(19) United States
(12) Patent Application Publication
(10) Pub. No.: US 2009/0076255 A1
(43) Pub. Date: Mar. 19, 2009

(54) Nucleic acid molecules and other molecules associated with plants

(76) Inventors: Scott E. Andersen, St. Louis, MO (US); James D. Masucci, Ballwin, MO (US)

Correspondence Address: ARNOLD & PORTER LLP, 555 TWELFTH STREET, N.W., ATTN: IP DOCKETING, WASHINGTON, DC, 20004, US

(21) Appl. No.: 11/301,327

(22) Filed: Dec. 13, 2005

Related U.S. Application Data
(63) Continuation of application No. 09/688,848, filed on Oct. 16, 2000, now abandoned.
(60) Provisional application No. 60/159,589, filed on Oct. 18, 1999.

(51) Int. Cl. C07H 21/04

(52) U.S. Cl. 536/23.6

(57) ABSTRACT

Expressed Sequence Tags (ESTs) isolated from lily are disclosed. The ESTs provide a unique molecular tool for the targeting and isolation of novel genes for plant protection and improvement. The disclosed ESTs have utility in the development of new strategies for understanding critical plant developmental and metabolic pathways. The disclosed ESTs have particular utility in isolating genes and promoters, identifying and mapping the genes involved in developmental and metabolic pathways, and determining gene function. Sequence homology analyses using the ESTs provided in the present invention, will result in more efficient gene screening for desirable agronomic traits. An expanding database of these select pieces of the plant genomics puzzle will quickly expand the knowledge necessary for subsequent functional validation, a key limitation in current plant biotechnology efforts.

### CROSS REFERENCE TO RELATED APPLICATIONS

[0001] This application is a continuation under 35 U.S.C. § 120 of U.S. application Ser. No. 09/688,848 filed Oct. 16, 2000, herein incorporated by reference in its entirety, which claims the benefit under 35 U.S.C. § 119(e) of U.S. Provisional Patent Application Ser. No. 60/159,589, filed Oct. 18, 1999, herein incorporated by reference in its entirety.

### INCORPORATION OF SEQUENCE LISTING

[0002] This application contains a sequence listing, which is contained on three identical CD-ROMs: two copies of the sequence listing (Copy 1 and Copy 2) and a sequence listing Computer Readable Form (CRF), all of which are herein incorporated by reference. All three CD-ROMs each contain one file called “38-21(51463)C seq listing.txt” which is 3,715,072 bytes in size (measured in MS-DOS) and which was created on Dec. 13, 2005.

### FIELD OF THE INVENTION

[0003] The present invention is in the field of plant biochemistry. More specifically the invention relates to nucleic acid molecules that encode proteins and fragments of proteins produced in plant cells, in particular, lily plants. The invention also relates to proteins and fragments of proteins so encoded and antibodies capable of binding the proteins. The invention also relates to methods of using the nucleic acid molecules, proteins and fragments of proteins.

### BACKGROUND OF THE INVENTION

### I. Expressed Sequence Tag Nucleic Acid Molecules

[0004] Expressed sequence tags, or ESTs, are short sequences of randomly selected clones from a cDNA (or complementary DNA) library which are representative of the cDNA inserts of these randomly selected clones. McCombie, et al., Nature Genetics, 1: 124-130 (1992); Kurata, et al., Nature Genetics, 8: 365-372 (1994); Okubo, et al., Nature Genetics, 2: 173-179 (1992), all of which references are incorporated herein in their entirety.

[0005] Using conventional methodologies, cDNA libraries can be constructed from the mRNA (messenger RNA) of a given tissue or organism using poly dT primers and reverse transcriptase (Efstratiadis, et al., Cell 7:279-288 (1976); Higuchi, et al., Proc. Natl. Acad. Sci. (U.S.A.) 73:3146-3150 (1976); Maniatis, et al., Cell 8:163 (1976); Land, et al., Nucleic Acids Res. 9:2251-2266 (1981); Okayama, et al., Mol. Cell. Biol. 2:161-170 (1982); Gubler, et al., Gene 25:263 (1983); all of which are herein incorporated by reference in their entirety).

[0006] Several methods may be employed to obtain full-length cDNA constructs. For example, terminal transferase can be used to add homopolymeric tails of dC residues to the free 3′ hydroxyl groups (Land, et al., Nucleic Acids Res. 9:2251-2266 (1981), herein incorporated by reference in its entirety). This tail can then be hybridized by a poly dG oligo which can act as a primer for the synthesis of full length second strand cDNA. Okayama and Berg, report a method for obtaining full length cDNA constructs. This method has been simplified by using synthetic primer-adapters that have both homopolymeric tails for priming the synthesis of the first and second strands and restriction sites for cloning into plasmids (Coleclough, et al., Gene 34:305-314 (1985), herein incorporated by reference in its entirety) and bacteriophage vectors (Krawinkel, et al., Nucleic Acids Res. 14:1913 (1986); and Han, et al., Nucleic Acids Res. 15:6304 (1987); both of which are herein incorporated by reference in their entirety).

[0007] These strategies have been coupled with additional strategies for isolating rare mRNA populations. For example, a typical mammalian cell contains between 10,000 and 30,000 different mRNA sequences. Davidson, Gene Activity in Early Development, 2nd ed., Academic Press, New York (1976). The number of clones required to achieve a given probability that a low-abundance mRNA will be present in a cDNA library is N=(ln(1−P))/(ln(1-l/n)) where N is the number of clones required, P is the probability desired, and 1/n is the fractional proportion of the total mRNA that is represented by a single rare mRNA. (Sambrook, et al., Molecular Cloning: A Laboratory Manual, 2nd ed., Cold Spring Harbor Laboratory Press (1989), herein incorporated by reference in its entirety).

[0008] A method to enrich preparations of mRNA for sequences of interest is to fractionate by size. One such method is to fractionate by electrophoresis through an agarose gel (Pennica, et al., Nature 301:214-221 (1983), herein incorporated by reference in its entirety). Another such method employs sucrose gradient centrifugation in the presence of an agent, such as methylmercuric hydroxide, that denatures secondary structure in RNA (Schweinfest, et al., Proc. Natl. Acad. Sci. (U.S.A.) 79:4997-5000 (1982), herein incorporated by reference in its entirety).

[0009] A frequently adopted method is to construct equalized or normalized cDNA libraries (Ko, Nucleic Acids Res. 18:5705-5711 (1990); Patanjali, S. R. et al., Proc. Natl. Acad. Sci. (U.S.A.) 88:1943-1947 (1991); both of which are herein incorporated by reference in their entirety). Typically, the cDNA population is normalized by subtractive hybridization (Schmid, et al., J. Neurochem. 48:307-312 (1987); Fargnoli, et al., Anal. Biochem. 187:364-373 (1990); Travis, et al., Proc. Natl. Acad. Sci. (U.S.A.) 85:1696-1700 (1988); Kato, Eur. J. Neurosci. 2:704 (1990); and Schweinfest, et al., Genet. Anal. Tech. Appl. 7:64 (1990); all of which are herein incorporated by reference in their entirety). Subtraction represents another method for reducing the population of certain sequences in the cDNA library (Swaroop, et al., Nucleic Acids Res. 19:1954 (1991), herein incorporated by reference in its entirety).

[0010] ESTs can be sequenced by a number of methods. Two basic methods may be used for DNA sequencing, the chain termination method of Sanger et al., Proc. Natl. Acad. Sci. (U.S.A.) 74: 5463-5467 (1977), the entirety of which is herein incorporated by reference and the chemical degradation method of Maxam and Gilbert, Proc. Nat. Acad. Sci. (U.S.A.) 74: 560-564 (1977), the entirety of which is herein incorporated by reference. Automation and advances in technology such as the replacement of radioisotopes with fluorescence-based sequencing have reduced the effort required to sequence DNA (Craxton, Methods, 2: 20-26 (1991); Ju et al., Proc. Natl. Acad. Sci. (U.S.A.) 92: 4347-4351 (1995); Tabor and Richardson, Proc. Natl. Acad. Sci. (U.S.A.) 92: 6339-6343 (1995); all of which are herein incorporated by reference in their entirety). Automated sequencers are available from, for example, Pharmacia Biotech, Inc., Piscataway, N.J. (Pharmacia ALF), LI-COR, Inc., Lincoln, Nebr. (LI-COR 4,000) and Millipore, Bedford, Mass. (Millipore BaseStation).

[0011] In addition, advances in capillary gel electrophoresis have also reduced the effort required to sequence DNA and such advances provide a rapid high resolution approach for sequencing DNA samples (Swerdlow and Gesteland, Nucleic Acids Res. 18:1415-1419 (1990); Smith, Nature 349:812-813 (1991); Luckey et al., Methods Enzymol. 218:154-172 (1993); Lu et al., J. Chromatog. A. 680:497-501 (1994); Carson et al., Anal. Chem. 65:3219-3226 (1993); Huang et al., Anal. Chem. 64:2149-2154 (1992); Kheterpal et al., Electrophoresis 17:1852-1859 (1996); Quesada and Zhang, Electrophoresis 17:1841-1851 (1996); Baba, Yakugaku Zasshi 117:265-281 (1997), all of which are herein incorporated by reference in their entirety).

[0012] ESTs longer than 150 bases have been found to be useful for similarity searches and mapping. (Adams, et al., Science 252:1651-1656 (1991), herein incorporated by reference.) EST sequences normally range from 150-450 bases. This is the length of sequence information that is routinely and reliably generated using single run sequence data. Typically, only single run sequence data is obtained from the cDNA library, Adams, et al., Science 252:1651-1656 (1991). Automated single run sequencing typically results in an approximately 2-3% error or base ambiguity rate. (Boguski, et al., Nature Genetics, 4:332-333 (1993), herein incorporated by reference in its entirety).

[0013] EST databases have been constructed or partially constructed from, for example, C. elegans (McCombrie, et al., Nature Genetics 1:124-131 (1992)), human liver cell line HepG2 (Okubo, et al., Nature Genetics 2:173-179 (1992)), human brain RNA (Adams, et al., Science 252:1651-1656 (1991); Adams, et al., Nature 355:632-635 (1992)), Arabidopsis, (Newman, et al., Plant Physiol. 106:1241-1255 (1994)); and rice (Kurata, et al., Nature Genetics 8:365-372 (1994).

### II. Sequence Comparisons

[0014] A characteristic feature of a protein or DNA sequence is that it can be compared with other known protein or DNA sequences. Sequence comparisons can be undertaken by determining the similarity of the test or query sequence with sequences in publicly available or propriety databases (“similarity analysis”) or by searching for certain motifs (“intrinsic sequence analysis”)(e.g. cis elements)(Coulson, Trends in Biotechnology, 12: 76-80 (1994); Birren, et al., Genome Analysis, 1: 543-559 (1997); both of which are herein incorporated by reference in their entirety).

[0015] Similarity analysis includes database search and alignment. Examples of public databases include the DNA Database of Japan (DDBJ)(on the Worldwide Web at ddbj.nig.acjp/); Genebank (on the Worldwide Web at ncbi.nlm.nih.gov/web/Genbank/Index.html); and the European Molecular Biology Laboratory Nucleic Acid Sequence Database (EMBL) (on the Worldwide Web at ebi.ac.uk/ebi_docs/embl_db.html). A number of different search algorithms have been developed, one example of which are the suite of programs referred to as BLAST programs. There are five implementations of BLAST, three designed for nucleotide sequences queries (BLASTN, BLASTX, and TBLASTX) and two designed for protein sequence queries (BLASTP and TBLASTN) (Coulson, Trends in Biotechnology, 12: 76-80 (1994); Birren, et al., Genome Analysis, 1: 543-559 (1997)).

[0016] BLASTN takes a nucleotide sequence (the query sequence) and its reverse complement and searches them against a nucleotide sequence database. BLASTN was designed for speed, not maximum sensitivity, and may not find distantly related coding sequences. BLASTX takes a nucleotide sequence, translates it in three forward reading frames and three reverse complement reading frames, and then compares the six translations against a protein sequence database. BLASTX is useful for sensitive analysis of preliminary (single-pass) sequence data and is tolerant of sequencing errors (Gish and States, Nature Genetics, 3: 266-272 (1993), herein incorporated by reference). BLASTN and BLASTX may be used in concert for analyzing EST data (Coulson, Trends in Biotechnology, 12: 76-80 (1994); Birren, et al., Genome Analysis, 1: 543-559 (1997)).

[0017] Given a coding nucleotide sequence and the protein it encodes, it is often preferable to use the protein as the query sequence to search a database because of the greatly increased sensitivity to detect more subtle relationships. This is due to the larger alphabet of proteins (20 amino acids) compared with the alphabet of nucleic acid sequences (4 bases), where it is far easier to obtain a match by chance. In addition, with nucleotide alignments, only a match (positive score) or a mismatch (negative score) is obtained, but with proteins, the presence of conservative amino acid substitutions can be taken into account. Here, a mismatch may yield a positive score if the non-identical residue has physical/chemical properties similar to the one it replaced. Various scoring matrices are used to supply the substitution scores of all possible amino acid pairs. A general purpose scoring system is the BLOSUM62 matrix (Henikoff and Henikoff, Proteins, 17: 49-61 (1993), herein incorporated by reference in its entirety), which is currently the default choice for BLAST programs. BLOSUM62 is tailored for alignments of moderately diverged sequences and thus may not yield the best results under all conditions. Altschul, J. Mol. Biol. 36: 290-300 (1993), herein incorporated by reference in its entirety, uses a combination of three matrices to cover all contingencies. This may improve sensitivity, but at the expense of slower searches. In practice, a single BLOSUM62 matrix is often used but others (PAM40 and PAM250) may be attempted when additional analysis is necessary. Low PAM matrices are directed at detecting very strong but localized sequence similarities, whereas high PAM matrices are directed at detecting long but weak alignments between very distantly related sequences.

[0018] Homologues in other organisms are available that can be used for comparative sequence analysis. Multiple alignments are performed to study similarities and differences in a group of related sequences. CLUSTAL W is a multiple sequence alignment package available that performs progressive multiple sequence alignments based on the method of Feng and Doolittle, J. Mol. Evol. 25: 351-360 (1987), the entirety of which is herein incorporated by reference. Each pair of sequences is aligned and the distance between each pair is calculated; from this distance matrix, a guide tree is calculated, and all of the sequences are progressively aligned based on this tree. A feature of the program is its sensitivity to the effect of gaps on the alignment; gap penalties are varied to encourage the insertion of gaps in probable loop regions instead of in the middle of structured regions. Users can specify gap penalties, choose between a number of scoring matrices, or supply their own scoring matrix for both the pairwise alignments and the multiple alignments. CLUSTAL W for UNIX and VMS systems is available at: ftp.ebi.ac.uk. Another program is MACAW (Schuler et al., Proteins, Struct. Func. Genet, 9:180-190 (1991), the entirety of which is herein incorporated by reference, for which both Macintosh and Microsoft Windows versions are available. MACAW uses a graphical interface, provides a choice of several alignment algorithms, and is available by anonymous ftp at: ncbi.nlm.nih.gov (directory/pub/macaw).

[0019] Sequence motifs are derived from multiple alignments and can be used to examine individual sequences or an entire database for subtle patterns. With motifs, it is sometimes possible to detect distant relationships that may not be demonstrable based on comparisons of primary sequences alone. Currently, the largest collection of sequence motifs in the world is PROSITE (Bairoch and Bucher, Nucleic Acid Research, 22: 3583-3589 (1994), the entirety of which is herein incorporated by reference.) PROSITE may be accessed via either the ExPASy server on the World Wide Web or anonymous ftp site. Many commercial sequence analysis packages also provide search programs that use PROSITE data.

[0020] A resource for searching protein motifs is the BLOCKS E-mail server developed by S. Henikoff, Trends Biochem Sci., 18:267-268 (1993); Henikoff and Henikoff, Nucleic Acid Research, 19:6565-6572 (1991); Henikoff and Henikoff, Proteins, 17: 49-61 (1993); all of which are herein incorporated by reference in their entirety). BLOCKS searches a protein or nucleotide sequence against a database of protein motifs or “blocks.” Blocks are defined as short, ungapped multiple alignments that represent highly conserved protein patterns. The blocks themselves are derived from entries in PROSITE as well as other sources. Either a protein or nucleotide query can be submitted to the BLOCKS server; if a nucleotide sequence is submitted, the sequence is translated in all six reading frames and motifs are sought in these conceptual translations. Once the search is completed, the server will return a ranked list of significant matches, along with an alignment of the query sequence to the matched BLOCKS entries.

[0021] Conserved protein domains can be represented by two-dimensional matrices, which measure either the frequency or probability of the occurrences of each amino acid residue and deletions or insertions in each position of the domain. This type of model, when used to search against protein databases, is sensitive and usually yields more accurate results than simple motif searches. Two popular implementations of this approach are profile searches (such as GCG program ProfileSearch) and Hidden Markov Models (HMMs)(Krough et al., J. Mol. Biol. 235:1501-1531 (1994); Eddy, Current Opinion in Structural Biology 6:361-365 (1996), both of which are herein incorporated by reference in their entirety). In both cases, a large number of common protein domains have been converted into profiles, as present in the PROSITE library, or HHM models, as in the Pfam protein domain library (Sonnhammer et al., Proteins 28:405-420 (1997), the entirety of which is herein incorporated by reference). Pfam contains more than 500 HMM models for enzymes, transcription factors, signal transduction molecules, and structural proteins. Protein databases can be queried with these profiles or HMM models, which will identify proteins containing the domain of interest. For example, HMMSW or HMMFS, two programs in a public domain package called HMMER (Sonnhammer et al., Proteins 28:405-420 (1997)) can be used.

[0022] PROSITE and BLOCKS represent collected families of protein motifs. Thus, searching these databases entails submitting a single sequence to determine whether or not that sequence is similar to the members of an established family. Programs working in the opposite direction compare a collection of sequences with individual entries in the protein databases. An example of such a program is the Motif Search Tool, or MoST (Tatusov et al. Proc. Natl. Acad. Sci. 91: 12091-12095 (1994), the entirety of which is herein incorporated by reference.) On the basis of an aligned set of input sequences, a weight matrix is calculated by using one of four methods (selected by the user); a weight matrix is simply a representation, position by position in an alignment, of how likely a particular amino acid will appear. The calculated weight matrix is then used to search the databases. To increase sensitivity, newly found sequences are added to the original data set, the weight matrix is recalculated, and the search is performed again. This procedure continues until no new sequences are found.

### SUMMARY OF THE INVENTION

[0023] The present invention provides a substantially purified nucleic acid molecule that encodes a lily protein or fragment thereof comprising a nucleic acid sequence selected from the group consisting of SEQ ID NO: 1 through SEQ ID NO: 6041.

[0024] The present invention also provides one or more substantially purified nucleic acid molecules comprising a nucleic acid sequence selected from the group consisting of SEQ ID NO: 1 through SEQ ID NO:6041 or complements thereof.

[0025] The present invention also provides a substantially purified lily protein or fragment thereof, wherein said lily protein is encoded by a nucleic acid molecule that comprises a nucleic acid sequence selected from the group consisting of SEQ ID NO: 1 through SEQ ID NO: 6041.

[0026] The present invention further provides a substantially purified protein, peptide, or fragment thereof encoded by a nucleic acid sequence which specifically hybridizes to a nucleic acid molecule comprising a nucleic acid sequence selected from the group consisting of a complement of SEQ ID NO: 1 through SEQ ID NO:6041.

[0027] The present invention further provides a substantially purified antibody capable of specifically binding to a protein or fragment thereof encoded by a nucleic acid sequence which specifically hybridizes to a nucleic acid molecule having a nucleic acid sequence selected from the group consisting of a complement of SEQ ID NO:1 through SEQ ID NO:6041.

[0028] The present invention also provides a transformed plant transformed to contain a nucleic acid molecule which comprises: (A) an exogeneous promoter region which functions in plant cells to cause the production of an mRNA molecule; which is linked to (B) a structural nucleic acid molecule, wherein said structural nucleic acid molecule comprises a nucleic acid molecule that encodes a protein, peptide, or fragment thereof which hybridizes to a nucleic acid sequence selected from the group consisting of a complement of SEQ ID NO: 1 through SEQ ID NO:6041 expressed in an effective amount to produce a desirable agronomic effect; which is linked to (C) a 3′ non-translated sequence that functions in plant cells to cause the termination of transcription and the addition of polyadenylated ribonucleotides to the 3′ end of the mRNA sequence.

[0029] The present invention also provides a transformed plant cell containing a nucleic acid molecule whose non-transcribed strand encodes a protein or fragment thereof, wherein the transcribed strand of said nucleic acid is complementary to a nucleic acid molecule that encodes a protein or fragment thereof. The present invention also provides bacterial, viral, microbial, and plant cells comprising a nucleic acid molecule of the present invention

[0030] The present invention also provides a method of producing a plant containing one or more proteins encoded by sequences comprising SEQ ID NO:1 or complement thereof through SEQ ID NO:6041 or complements thereof, expressed in a sufficient amount and/or fashion to produce a desirable agronomic effect.

[0031] In accomplishing the foregoing, there is provided, in accordance with one aspect of the present invention, methods of producing genetically transformed plants, comprising the steps of:
[0032] (a) inserting into the genome of a plant cell a recombinant, double-stranded DNA molecule comprising
   [0033] (i) a promoter which functions in plant cells to cause the production of an RNA sequence,
   [0034] (ii) a structural DNA sequence that causes the production of an RNA sequence which encodes a desired protein.
   [0035] (iii) a 3′ non-translated DNA sequence which functions in plant cells to cause the addition of polyadenylated nucleotides to the 3′ end of RNA sequence; where the promoter is homologous or heterologous with respect to the coding sequence and adapted to cause sufficient expression of a protein in desired plant tissues to enhance the agronomic utility of a plant transformed with said gene.
[0036] (b) obtaining a transformed plant cell with said nucleic acid molecule that encodes one or more proteins, wherein said nucleic acid molecule is transcribed and results in expression of said protein(s); and
[0037] (c) regenerating from the transformed plant cell a genetically transformed plant

[0038] The present invention also encompasses differentiated plants, seeds, and progeny comprising said transformed plant cells and which exhibit novel properties of agronomic significance.

[0039] The present invention also provides a method of producing a plant containing reduced levels of a protein comprising: (A) transforming a plant cell with a nucleic acid molecule that encodes a protein, wherein said nucleic acid molecule is transcribed and results in co-suppression of endogenous protein synthesis activity, and (B) regenerating plants and producing subsequent progeny from the transformed plant.

[0040] The present invention also provides a method of determining an association between a polymorphism and a plant trait comprising: (A) hybridizing a nucleic acid molecule specific for a polymorphism to genetic material of a plant, wherein said nucleic acid molecule comprising a nucleic acid sequence selected from the group consisting of SEQ ID NO: 1 through SEQ ID NO:6041 or complements thereof, and (B) calculating the degree of association between the polymorphism and the plant trait.

[0041] The present invention also provides a method of isolating a genetic region, or nucleic acid that encodes a protein or fragment thereof comprising: (A) incubating under conditions permitting nucleic acid hybridization: a marker nucleic acid molecule, preferably an EST, with a complementary nucleic acid molecule obtained from a plant cell or plant tissue; (B) permitting hybridization between said marker nucleic acid molecule, preferably an EST, and said complementary nucleic acid molecule obtained from said plant cell or plant tissue; and (C) isolating said complementary nucleic acid molecule.

[0042] The present invention also provides a method for determining a level or pattern in a plant cell of a protein in a plant comprising: (A) incubating, under conditions permitting nucleic acid hybridization, a marker nucleic acid molecule, the marker nucleic acid molecule selected from the group of marker nucleic acid molecules which specifically hybridize to a nucleic acid molecule having the nucleic acid sequence selected from the group consisting of SEQ ID NO: 1 through SEQ ID NO: 6041 or complements thereof or fragments of either, with a complementary nucleic acid molecule obtained from the plant cell or plant tissue, wherein nucleic acid hybridization between the marker nucleic acid molecule and the complementary nucleic acid molecule obtained from the plant cell or plant tissue permits the detection of an mRNA for the enzyme; (B) permitting hybridization between the marker nucleic acid molecule and the complementary nucleic acid molecule obtained from the plant cell or plant tissue; and (C) detecting the level or pattern of the complementary nucleic acid, wherein the detection of the complementary nucleic acid is predictive of the level or pattern of the protein.

[0043] The present invention also provides a method for determining the level or pattern of a protein in a plant cell or plant tissue comprising: (A) incubating under conditions permitting nucleic acid hybridization: a marker nucleic acid molecule, the marker nucleic acid molecule comprising a nucleotide sequence selected from the group consisting of SEQ ID NO: 1 through SEQ ID NO:6041 or complements thereof, with a complementary nucleic acid molecule obtained from a plant cell or plant tissue, wherein nucleic acid hybridization between the marker nucleic acid molecule, and the complementary nucleic acid molecule obtained from the plant cell or plant tissue permits the detection of said protein; (B) permitting hybridization between the marker nucleic acid molecule and the complementary nucleic acid molecule obtained from the plant cell or plant tissue; and (C) detecting the level or pattern of the complementary nucleic acid, wherein the detection of said complementary nucleic acid is predictive of the level or pattern of the protein synthesis.

[0044] The present invention also provides a method for determining a level or pattern of a protein in a plant cell or plant tissue which comprises assaying the concentration of a molecule, whose concentration is dependent upon the expression of a gene, the gene having a nucleic acid sequence which specifically hybridizes to a protein marker nucleic acid molecule, the molecule being present in a plant cell or plant tissue, in comparison to the concentration of that molecule present in a plant cell or plant tissue with a known level or pattern of said protein, wherein an assayed concentration of the molecule is compared to the assayed concentration of the molecule in a plant cell or plant tissue with a known level or pattern of said protein.

[0045] The present invention also provides a method of determining a mutation in a plant whose presence is predictive of a mutation affecting a level or pattern of a protein comprising the steps: (A) incubating, under conditions permitting nucleic acid hybridization, a marker nucleic acid, the marker nucleic acid selected from the group of marker nucleic acid molecules which specifically hybridize to a nucleic acid molecule consisting of the nucleic acid sequence selected from the group consisting of SEQ ID NO: 1 through SEQ ID NO: 6041 or complements thereof or fragments of either and a complementary nucleic acid molecule obtained from the plant, wherein nucleic acid hybridization between the marker nucleic acid molecule and the complementary nucleic acid molecule obtained from the plant permits the detection of a polymorphism whose presence is predictive of a mutation affecting the level or pattern of the protein in the plant; (B) permitting hybridization between the marker nucleic acid molecule and the complementary nucleic acid molecule obtained from the plant; and (C) detecting the presence of the polymorphism, wherein the detection of the polymorphism is predictive of the mutation.

[0046] The present invention also provides a method for determining a mutation in a plant whose presence is predictive of a mutation affecting the level or pattern of protein synthesis comprising the steps: (A) incubating under conditions permitting nucleic acid hybridization: a marker nucleic acid molecule, the marker nucleic acid molecule comprising a nucleic acid molecule that is linked to gene, the gene having a nucleic acid sequence which specifically hybridizes to a sequence selected from the group consisting of SEQ ID NO: 1 through SEQ ID NO:6041 and complements thereof, and a complementary nucleic acid molecule obtained from a plant tissue or plant cell of the plant, wherein nucleic acid hybridization between the marker nucleic acid molecule and the complementary nucleic acid molecule obtained from the plant permits the detection of a polymorphism whose presence is predictive of a mutation affecting said level or pattern of a protein synthesis in the plant; (B) permitting hybridization between said marker nucleic acid molecule and said complementary nucleic acid molecule obtained from said plant; and; (C) detecting the presence of the polymorphism, wherein the detection of the polymorphism is predictive of the mutation.

[0047] The present invention also provides a method for reducing expression of a protein in a plant cell, the method comprising: growing a transformed plant cell containing a nucleic acid molecule whose non-transcribed strand encodes a protein or fragment thereof, wherein the transcribed strand of said nucleic acid is complementary to a nucleic acid molecule that encodes the protein in said plant cell, and whereby the strand that is complementary to the nucleic acid molecule that encodes the protein reduces or depresses expression of the protein.

[0048] The present invention provides lily nucleic acid molecules for use as molecular tags to isolate genetic regions (i.e. promoters and flanking sequences), isolate genes, map genes, and determine gene function. The present invention further provides lily nucleic acid molecules for use in determining if genes are members of a particular gene family.

[0049] The present invention also provides a method of obtaining full length genes using lily ESTs or complements thereof or fragments of either.

[0050] The present invention also provides a method of isolating promoters and flanking sequences using lily ESTs or complements thereof or fragments of either.

[0051] The present invention also provides lily ESTs or complements thereof or fragments of either for use in marker-assisted breeding programs.

[0052] The present invention also provides a method of identifying tissues comprising hybridizing nucleic acids from the tissue with lily ESTs or complements thereof or fragments of either.

[0053] The present invention also provides a method for production of antibodies targeted against the proteins, peptides, or fragments produced by the disclosed or complements thereof or fragments of either.

[0054] The present invention also provides a method for the transformation and regeneration of plants comprising sequences hybridizable to the disclosed ESTs or complements thereof or fragments of either.

[0055] The present invention also provides a method of modifying plant protein expression by inserting in a chimeric gene sense or antisense constructs of the lily ESTs.

### DETAILED DESCRIPTION OF THE INVENTION

### Agents

[0056] (a) Nucleic Acid Molecules

[0057] Agents of the present invention include nucleic acid molecules and more specifically EST nucleic acid molecules or nucleic acid fragment molecules thereof. Fragment EST nucleic acid molecules may encode significant portion(s) of, or indeed most of, the EST nucleic acid molecule. Alternatively, the fragments may comprise smaller oligonucleotides (having from about 15 to about 250 nucleotide residues, and more preferably, about 15 to about 30 nucleotide residues).

[0058] A subset of the nucleic acid molecules of the present invention includes nucleic acid molecules that are marker molecules. Another subset of the nucleic acid molecules of the present invention include nucleic acid molecules that encode a protein or fragment thereof. Another subset of the nucleic acid molecules of the present invention are EST molecules.

[0059] The term “substantially purified”, as used herein, refers to a molecule separated from substantially all other molecules normally associated with it in its native state. More preferably a substantially purified molecule is the predominant species present in a preparation. A substantially purified molecule may be greater than 60% free, preferably 75% free, more preferably 90% free, and most preferably 95% free from the other molecules (exclusive of solvent) present in the natural mixture. The term “substantially purified” is not intended to encompass molecules present in their native state.

[0060] The agents of the present invention will preferably be “biologically active” with respect to either a structural attribute, such as the capacity of a nucleic acid to hybridize to another nucleic acid molecule, or the ability of a protein to be bound by antibody (or to compete with another molecule for such binding). Alternatively, such an attribute may be catalytic, and thus involve the capacity of the agent to mediate a chemical reaction or response.

[0061] The agents of the present invention may also be recombinant. As used herein, the term recombinant, refers to a) molecules that are constructed outside of living cells by joining natural or synthetic DNA segments to DNA molecules that can replicate in a living cell or b) molecules that result from the replication or expression of those molecules described above or c) amino acid molecules from different sources which are joined together.

[0062] It is understood that the agents of the present invention may be labeled with reagents that facilitate detection of the agent (e.g. fluorescent labels (Prober, et al., Science 238:336-340 (1987); Albarella et al., EP 144914, chemical labels (Sheldon et al., U.S. Pat. No. 4,582,789; Albarella et al., U.S. Pat. No. 4,563,417, modified bases (Miyoshi et al., EP 119448, all of which are hereby incorporated by reference in their entirety).

[0063] It is further understood, that the present invention provides bacterial, viral, microbial, and plant cells comprising the agents of the present invention.

[0064] Nucleic acid molecules or fragment thereof of the present invention are capable of specifically hybridizing to other nucleic acid molecules under certain circumstances. As used herein, two nucleic acid molecules are said to be capable of specifically hybridizing to one another if the two molecules are capable of forming an anti-parallel, double-stranded nucleic acid structure. A nucleic acid molecule is said to be the “complement” of another nucleic acid molecule if they exhibit complete complementarity. As used herein, molecules are said to exhibit “complete complementarity” when every nucleotide of one of the molecules is complementary to a nucleotide of the other. Two molecules are said to be “minimally complementary” if they can hybridize to one another with sufficient stability to permit them to remain annealed to one another under at least conventional “low-stringency” conditions. Similarly, the molecules are said to be “complementary” if they can hybridize to one another with sufficient stability to permit them to remain annealed to one another under conventional “high-stringency” conditions. Conventional stringency conditions are described by Sambrook, et al., In: Molecular Cloning, A Laboratory Manual, 2nd Edition, Cold Spring Harbor Press, Cold Spring Harbor, New York (1989), and by Haymes, et al. In: Nucleic Acid Hybridization, A Practical Approach, IRL Press, Washington, D.C. (1985), the entirety of which is herein incorporated by reference. Departures from complete complementarity are therefore permissible, as long as such departures do not completely preclude the capacity of the molecules to form a double-stranded structure. Thus, in order for an nucleic acid molecule or fragment of the present invention to serve as a primer or probe it need only be sufficiently complementary in sequence to be able to form a stable double-stranded structure under the particular solvent and salt concentrations employed.

[0065] Appropriate stringency conditions which promote DNA hybridization are, for example, 6.0× sodium chloride/sodium citrate (SSC) at about 45° C., followed by a wash of 2.0×SSC at 50° C., are known to those skilled in the art or can be found in Current Protocols in Molecular Biology, John Wiley & Sons, N.Y. (1989), 6.3.1-6.3.6. For example, the salt concentration in the wash step can be selected from a low stringency of about 2.0×SSC at 50° C. to a high stringency of about 0.2×SSC at 50° C. In addition, the temperature in the wash step can be increased from low stringency conditions at room temperature, about 22° C., to high stringency conditions at about 65° C. Both temperature and salt may be varied, or either the temperature or the salt concentration may be held constant while the other variable is changed.

[0066] In a preferred embodiment, a nucleic acid of the present invention will specifically hybridize to one or more of the nucleic acid molecules set forth in SEQ ID NO: 1 through SEQ ID NO: 6041 or complements thereof under moderately stringent conditions, for example, at about 2.0×SSC and about 65° C.

[0067] In a particularly preferred embodiment, a nucleic acid of the present invention will include those nucleic acid molecules that specifically hybridize to one or more of the nucleic acid molecules set forth in SEQ ID NO: 1 through SEQ ID NO: 6041 or complements thereof under high stringency conditions.

[0068] In one aspect of the present invention, the nucleic acid molecules of the present invention have one or more of the nucleic acid sequences set forth in SEQ ID NO: 1 through SEQ ID NO:6041 or complements thereof. In another aspect of the present invention, one or more of the nucleic acid molecules of the present invention share between 100% and 90% sequence identity with one or more of the nucleic acid sequences set forth in SEQ ID NO: 1 through SEQ ID NO:6041 or complements thereof. In a further aspect of the present invention, one or more of the nucleic acid molecules of the present invention share between 100% and 95% sequence identity with one or more of the nucleic acid sequences set forth in SEQ ID NO: 1 through SEQ ID NO:6041 or complements thereof. In a more preferred aspect of the present invention, one or more of the nucleic acid molecules of the present invention share between 100% and 98% sequence identity with one or more of the nucleic acid sequences set forth in SEQ ID NO: 1 through SEQ ID NO:6041 or complements thereof. In an even more preferred aspect of the present invention, one or more of the nucleic acid molecules of the present invention share between 100% and 99% sequence identity with one or more of the sequences set forth in SEQ ID NO: 1 through SEQ ID NO:6041 or complements thereof. In a further, even more preferred aspect of the present invention, one or more of the nucleic acid molecules of the present invention exhibit 100% sequence identity with one or more nucleic acid molecules present within the subtractive cDNA libraries designated LIB3229 and LIB3230 (Monsanto Company, St. Louis, Mo., United States of America).

[0069] “Percentage of sequence identity” is determined by comparing two optimally aligned sequences over a comparison window, wherein the portion of the polynucleotide sequence in the comparison window may comprise additions or deletions (i.e., gaps) as compared to the reference sequence (which does not comprise additions or deletions) for optimal alignment of the two sequences. The percentage is calculated by determining the number of positions at which the identical nucleic acid base or amino acid residue occurs in both sequences to yield the number of matched positions, dividing the number of matched positions by the total number of positions in the window of comparison and multiplying the result by 100 to yield the percentage of sequence identity. Methods commonly employed to determine percentage sequence identity between two sequences include, but are not limited to, those disclosed in Guide to Huge Computers, Martin J. Bishop, ed., Academic Press, San Diego, 1994, and Carillo, H., and Lipton, D.; Siam, J Applied Math (1988) 48:1073, herein incorporated by reference in their entirety. Methods to determine percentage sequence identity are codified in computer programs. Preferred computer programs for determining percentage sequence identity between two sequences include, but are not limited to, the BLAST suite of programs publicly available from NCBI and other sources (BLAST Manual, Altschul et al., Natl. Cent. Biotechnol. Inf., Natl. Library Med. (NCBI NLM) NIH, Bethesda, Md. 20894; Altschul et al., J. Mol. Biol. 215:403-410 (1990), Pearson et al., Proc. Natl. Acad. Sci. U.S.A. 85:2444-2448 (1988), the FAST programs (Pearson et al., Proc. Natl. Acad. Sci. USA. 85:2444-2448 (1988), the GAP and BESTFIT programs found in the GCG program package, (Madison, Wis.) and Cross_Match (Phi Green, University of Washington). Another preferred method to determine identity, is by the method of DNASTAR protein alignment protocol using the Jotun-Hein algorithm (Hein et al., Methods Enzymol. 183:626-645 (1990)).

[0070] In a preferred embodiment of the present invention, a lily protein or fragment thereof of the present invention is a homologue of another plant protein. In another preferred embodiment of the present invention, a lily protein or fragment thereof of the present invention is a homologue of a fungal protein. In another preferred embodiment of the present invention, a lily protein or fragment thereof of the present invention is a homologue of mammalian protein. In another preferred embodiment of the present invention, a lily protein or fragment thereof of the present invention is a homologue of a bacterial protein. In another preferred embodiment of the present invention, a lily protein or fragment thereof of the present invention is a homologue of an algal protein. In another preferred embodiment of the present invention, a lily protein or fragment thereof of the present invention is a homologue of a maize protein. In another preferred embodiment of the present invention, a lily protein or fragment thereof of the present invention is a homologue of a soybean protein. In another preferred embodiment of the present invention, a lily protein or fragment thereof of the present invention is a homologue of a cotton protein. In another preferred embodiment of the present invention, a lily protein or fragment thereof of the present invention is a homologue of a wheat protein.

[0071] In a preferred embodiment of the present invention, the nucleic molecule of the present invention encodes a lily protein or fragment thereof where a lily protein or fragment thereof exhibits a BLAST probability score of greater than 1E-12, preferably a BLAST probability score of between about 1E-30 and about 1E-12, even more preferably a BLAST probability score of greater than 1E-30 with its homologue.

[0072] In another preferred embodiment of the present invention, the nucleic acid molecule encoding a lily protein or fragment thereof exhibits a % identity with its homologue of between about 25% and about 40%, more preferably of between about 40 and about 70%, even more preferably of between about 70% and about 90% and even more preferably between about 90% and 99%. In another preferred embodiment, of the present invention, a lily protein or fragment thereof exhibits a % identity with its homologue of 100%.

[0073] In a preferred embodiment of the present invention, the nucleic molecule of the present invention encodes a lily protein or fragment thereof where the lily protein exhibits a BLAST score of greater than 120, preferably a BLAST score of between about 1450 and about 120, even more preferably a BLAST score of greater than 1450 with its homologue.

[0074] Nucleic acid molecules of the present invention also include non-lily homologues. Preferred non-lily homologues are selected from the group consisting of alfalfa, Arabidopsis, barley, Brassica, broccoli, cabbage, citrus, cotton, garlic, oat, oilseed rape, onion, canola, flax, an ornamental plant, maize, pea, peanut, pepper, potato, rice, rye, sorghum, soybean, strawberry, sugarcane, sugarbeet, tomato, wheat, poplar, pine, fir, eucalyptus, apple, lettuce, lentils, grape, banana, tea, turf grasses, sunflower, oil palm and Phaseolus.

[0075] The degeneracy of the genetic code, which allows different nucleic acid sequences to code for the same protein or peptide, is known in the literature. (U.S. Pat. No. 4,757,006, the entirety of which is herein incorporated by reference).

[0076] In an aspect of the present invention, one or more of the nucleic acid molecules of the present invention differ in nucleic acid sequence from those encoding a lily protein or fragment thereof in SEQ ID NO: 1 through SEQ ID NO: 6041 due to the degeneracy in the genetic code in that they encode the same protein but differ in nucleic acid sequence.

[0077] In another further aspect of the present invention, nucleic acid molecules of the present invention can comprise sequences, which differ from those encoding a protein or fragment thereof in SEQ ID NO: 1 through SEQ ID NO: 6041 due to fact that the different nucleic acid sequence encodes a protein having one or more conservative amino acid changes. It is understood that codons capable of coding for such conservative amino acid substitutions are known in the art.

[0078] It is well known in the art that one or more amino acids in a native sequence can be substituted with another amino acid(s), the charge and polarity of which are similar to that of the native amino acid, i.e., a conservative amino acid substitution, resulting in a silent change. Conserved substitutes for an amino acid within the native polypeptide sequence can be selected from other members of the class to which the naturally occurring amino acid belongs. Amino acids can be divided into the following four groups: (1) acidic amino acids, (2) basic amino acids, (3) neutral polar amino acids, and (4) neutral nonpolar amino acids. Representative amino acids within these various groups include, but are not limited to, (1) acidic (negatively charged) amino acids such as aspartic acid and glutamic acid; (2) basic (positively charged) amino acids such as arginine, histidine, and lysine; (3) neutral polar amino acids such as glycine, serine, threonine, cysteine, cystine, tyrosine, asparagine, and glutamine; and (4) neutral nonpolar (hydrophobic) amino acids such as alanine, leucine, isoleucine, valine, proline, phenylalanine, tryptophan, and methionine.

[0079] Conservative amino acid changes within the native polypeptides sequence can be made by substituting one amino acid within one of these groups with another amino acid within the same group. Biologically functional equivalents of the proteins or fragments thereof of the present invention can have 10 or fewer conservative amino acid changes, more preferably seven or fewer conservative amino acid changes, and most preferably five or fewer conservative amino acid changes. The encoding nucleotide sequence will thus have corresponding base substitutions, permitting it to encode biologically functional equivalent forms of the proteins or fragments of the present invention.

[0080] It is understood that certain amino acids may be substituted for other amino acids in a protein structure without appreciable loss of interactive binding capacity with structures such as, for example, antigent-binding regions of antibodies or binding sites on substrate molecules. Because it is the interactive capacity and nature of a protein that defines that protein's biological functional activity, certain amino acid sequence substitutions can be made in a protein sequence and, of course, its underlying DNA coding sequence and, nevertheless, obtain a protein with like properties. It is thus contemplated by the inventors that various changes may be made in the peptide sequences of the proteins or fragments of the present invention, or corresponding DNA sequences that encode said peptides, without appreciable loss of their biological utility or activity. It is understood that codons capable of coding for such amino acid changes are known in the art.

[0081] In making such changes, the hydropathic index of amino acids may be considered. The importance of the hydropathic amino acid index in conferring interactive biological function on a protein is generally understood in the art (Kyte and Doolittle, J. Mol. Biol. 157, 105-132 (1982), herein incorporated by reference in its entirety). It is accepted that the relative hydropathic character of the amino acid contributes to the secondary structure of the resultant protein, which in turn defines the interaction of the protein with other molecules, for example, enzymes, substrates, receptors, DNA, antibodies, antigens, and the like.

[0082] Each amino acid has been assigned a hydropathic index on the basis of its hydrophobicity and charge characteristics (Kyte and Doolittle, 1982); these are isoleucine (+4.5), valine (+4.2), leucine (+3.8), phenylalanine (+2.8), cysteine/cystine (+2.5), methionine (+1.9), alanine (+1.8), glycine (−0.4), threonine (−0.7), serine (−0.8), tryptophan (−0.9), tyrosine (−1.3), proline (−1.6), histidine (−3.2), glutamate (−3.5), glutamine (−3.5), aspartate (−3.5), asparagine (−3.5), lysine (−3.9), and arginine (−4.5).

[0083] In making such changes, the substitution of amino acids whose hydropathic indices are within ±2 is preferred, those which are within ±1 are particularly preferred, and those within ±0.5 are even more particularly preferred.

[0084] It is also understood in the art that the substitution of like amino acids can be made effectively on the basis of hydrophilicity. U.S. Pat. No. 4,554,101, incorporated herein by reference in its entirety, states that the greatest local average hydrophilicity of a protein, as govern by the hydrophilicity of its adjacent amino acids, correlates with a biological property of the protein.

[0085] As detailed in U.S. Pat. No. 4,554,101, the following hydrophilicity values have been assigned to amino acid residues: arginine (+3.0), lysine (+3.0), aspartate (+3.0±1), glutamate (+3.0±1), serine (+0.3), asparagine (+0.2), glutamine (+0.2), glycine (0), threonine (−0.4), proline (−0.5±1), alanine (−0.5), histidine (−0.5), cysteine (−1.0), methionine (−1.3), valine (−1.5), leucine (−1.8), isoleucine (−1.8), tyrosine (−2.3), phenylalanine (−2.5), and tryptophan (−3.4).

[0086] In making such changes, the substitution of amino acids whose hydrophilicity values are within ±2 is preferred, those which are within ±1 are particularly preferred, and those within ±0.5 are even more particularly preferred.

[0087] In a further aspect of the present invention, one or more of the nucleic acid molecules of the present invention differ in nucleic acid sequence from those encoding a lily protein or fragment thereof set forth in SEQ ID NO: 1 through SEQ ID NO: 6041 or fragment thereof due to the fact that one or more codons encoding an amino acid has been substituted for a codon that encodes a nonessential substitution of the amino acid originally encoded.

[0088] One aspect of the present invention concerns markers that include nucleic acid molecules SEQ ID NO: 1 through SEQ ID NO: 6041 or complements thereof or fragments of either that can act as markers or other nucleic acid molecules of the present invention that can act as markers. Genetic markers of the present invention include “dominant” or “codominant” markers “Codominant markers” reveal the presence of two or more alleles (two per diploid individual) at a locus. “Dominant markers” reveal the presence of only a single allele per locus. The presence of the dominant marker phenotype (e.g., a band of DNA) is an indication that one allele is present in either the homozygous or heterozygous condition. The absence of the dominant marker phenotype (e.g. absence of a DNA band) is merely evidence that “some other” undefined allele is present. In the case of populations where individuals are predominantly homozygous and loci are predominately dimorphic, dominant and codominant markers can be equally valuable. As populations become more heterozygous and multi-allelic, codominant markers often become more informative of the genotype than dominant markers. Marker molecules can be, for example, capable of detecting polymorphisms such as single nucleotide polymorphisms (SNPs).

[0089] SNPs are single base changes in genomic DNA sequence. They occur at greater frequency and are spaced with a greater uniformity throughout a genome than other reported forms of polymorphism. The greater frequency and uniformity of SNPs means that there is greater probability that such a polymorphism will be found near or in a genetic locus of interest than would be the case for other polymorphisms. SNPs are located in protein-coding regions and noncoding regions of a genome. Some of these SNPs may result in defective or variant protein expression (e.g., as a results of mutations or defective splicing). Analysis (genotyping) of characterized SNPs can require only a plus/minus assay rather than a lengthy measurement, permitting easier automation.

[0090] SNPs can be characterized using any of a variety of methods. Such methods include the direct or indirect sequencing of the site, the use of restriction enzymes (Botstein et al., Am. J. Hum. Genet. 32:314-331 (1980); Konieczny and Ausubel, Plant J. 4:403-410 (1993); both of which are herein incorporated by reference in their entirety), enzymatic and chemical mismatch assays (Myers et al., Nature 313:495-498 (1985), herein incorporated by reference in its entirety), allele-specific PCR (Newton et al., Nucl. Acids Res. 17:2503-2516 (1989); Wu et al., Proc. Natl. Acad. Sci. (U.S.A.) 86:2757-2760 (1989); both of which are herein incorporated by reference in their entirety), ligase chain reaction (Barany, Proc. Natl. Acad. Sci. (U.S.A.) 88:189-193 (1991), herein incorporated by reference in its entirety), single-strand conformation polymorphism analysis (Labrune et al., Am. J. Hum. Genet. 48: 1115-1120 (1991), herein incorporated by reference in its entirety), primer-directed nucleotide incorporation assays (Kuppuswami et al., Proc. Natl. Acad. Sci. USA 88:1143-1147 (1991), herein incorporated by reference in its entirety), dideoxy fingerprinting (Sarkar et al., Genomics 13:441-443 (1992), herein incorporated by reference in its entirety), solid-phase ELISA-based oligonucleotide ligation assays (Nikiforov et al., Nucl. Acids Res. 22:4167-4175 (1994), herein incorporated by reference in its entirety), oligonucleotide fluorescence-quenching assays (Livak et al., PCR Methods Appl. 4:357-362 (1995), herein incorporated by reference in its entirety), 5′-nuclease allele-specific hybridization TaqMan assay (Livak et al., Nature Genet. 9:341-342 (1995), herein incorporated by reference in its entirety), template-directed dye-terminator incorporation (TDI) assay (Chen and Kwok, Nucl. Acids Res. 25:347-353 (1997), herein incorporated by reference in its entirety), allele-specific molecular beacon assay (Tyagi et al., Nature Biotech. 16: 49-53 (1998), herein incorporated by reference in its entirety), PinPoint assay (Haff and Smirnov, Genome Res. 7: 378-388 (1997), herein incorporated by reference in its entirety) and dCAPS analysis (Neff et al., Plant J. 14:387-392 (1998), herein incorporated by reference in its entirety).

[0091] Additional markers, such as AFLP markers, RFLP markers and RAPD markers, can be utilized (Walton, Seed World 22-29 (July, 1993); Burow and Blake, Molecular Dissection of Complex Traits, 13-29, Paterson (ed.), CRC Press, New York (1988); both of which are herein incorporated by reference in their entirety). DNA markers can be developed from nucleic acid molecules using restriction endonucleases, the PCR and/or DNA sequence information. RFLP markers result from single base changes or insertions/deletions. These codominant markers are highly abundant in plant genomes, have a medium level of polymorphism and are developed by a combination of restriction endonuclease digestion and Southern blotting hybridization. CAPS are similarly developed from restriction nuclease digestion but only of specific PCR products. These markers are also codominant, have a medium level of polymorphism and are highly abundant in the genome. The CAPS result from single base changes and insertions/deletions.

[0092] Another marker type, RAPDs, are developed from DNA amplification with random primers and result from single base changes and insertions/deletions in plant genomes. They are dominant markers with a medium level of polymorphisms and are highly abundant. AFLP markers require using the PCR on a subset of restriction fragments from extended adapter primers. These markers are both dominant and codominant are highly abundant in genomes and exhibit a medium level of polymorphism.

[0093] SSRs require DNA sequence information. These codominant markers result from repeat length changes, are highly polymorphic and do not exhibit as high a degree of abundance in the genome as CAPS, AFLPs and RAPDs, SNPs also require DNA sequence information. These codominant markers result from single base substitutions. They are highly abundant and exhibit a medium of polymorphism (Rafalski et al., In: Nonmammalian Genomic Analysis, Birren and Lai (ed.), Academic Press, San Diego, Calif., pp. 75-134 (1996), herein incorporated by reference in its entirety). It is understood that a nucleic acid molecule of the present invention may be used as a marker.

[0094] A PCR probe is a nucleic acid molecule capable of initiating a polymerase activity while in a double-stranded structure with another nucleic acid. Various methods for determining the structure of PCR probes and PCR techniques exist in the art. Computer generated searches using programs such as Primer3 (on the Worldwide Web at genome.wi.mit.edu/cgi-bin/primer/primer3.cgi), STSPipeline (on the Worldwide Web at genome.wi.mit.edu/cgi-bin/www-STS_Pipeline), or GeneUp (Pesole et al., BioTechniques 25:112-123 (1998) the entirety of which is herein incorporated by reference), for example, can be used to identify potential PCR primers.

[0095] It is understood that a fragment of one or more of the nucleic acid molecules of the present invention may be a probe and specifically a PCR probe.

[0096] (b) Protein and Peptide Molecules

[0097] A class of agents comprises one or more of the protein or peptide molecules encoded by SEQ ID NO: 1 through SEQ ID NO:6041 or one or more of the protein or fragment thereof or peptide molecules encoded by other nucleic acid agents of the present invention. As used herein, the term “protein molecule” or “peptide molecule” includes any molecule that comprises five or more amino acids. It is well know in the art that proteins may undergo modification, including post-translational modifications, such as, but not limited to, disulfide bond formation, glycosylation, phosphorylation, or oligomerization. Thus, as used herein, the term “protein molecule” or “peptide molecule” includes any protein molecule that is modified by any biological or non-biological process. The terms “amino acid” and “amino acids” refer to all naturally occurring L-amino acids. This definition is meant to include norleucine, ornithine, homocysteine, and homoserine.

[0098] One or more of the protein or fragment of peptide molecules may be produced via chemical synthesis, or more preferably, by expression in a suitable bacterial or eukaryotic host. Suitable methods for expression are described by Sambrook, et al., (In: Molecular Cloning, A Laboratory Manual, 2nd Edition, Cold Spring Harbor Press, Cold Spring Harbor, N.Y. (1989)), or similar texts.

[0099] A “protein fragment” is a peptide or polypeptide molecule whose amino acid sequence comprises a subset of the amino acid sequence of that protein. A protein or fragment thereof that comprises one or more additional peptide regions not derived from that protein is a “fusion” protein. Such molecules may be derivatized to contain carbohydrate or other moieties (such as keyhole limpet hemocyanin, etc.). Fusion protein or peptide molecule of the present invention are preferably produced via recombinant means.

[0100] Another class of agents comprise protein or peptide molecules encoded by SEQ ID NO: 1 through SEQ ID NO:6041 or complements thereof or, fragments or fusions thereof in which non-essential, or not relevant, amino acid residues have been added, replaced, or deleted. An example of such a homologue is the homologue protein of all non-lily plant species, including but not limited to alfalfa, Arabidopsis, barley, Brassica, broccoli, cabbage, citrus, cotton, garlic, oat, oilseed rape, onion, canola, flax, maize, an ornamental plant, pea, peanut, pepper, potato, rice, rye, sorghum, soybean, strawberry, sugarcane, sugarbeet, tomato, wheat, poplar, pine, fir, eukalyptus, apple, lettuce, peas, lentils, grape, banana, tea, turf grasses, etc. Particularly preferred non-lily plants to utilize for the isolation of homologues would include alfalfa, Arabidopsis, barley, cotton, oat, oilseed rape, rice, corn, canola, ornamentals, soybean, sugarcane, sugarbeet, tomato, potato, wheat, and turf grasses. Such a homologue can be obtained by any of a variety of methods. Most preferably, as indicated above, one or more of the disclosed sequences (SEQ ID NO: 1 through SEQ ID NO:6041 or complements thereof) will be used to define a pair of primers that may be used to isolate the homologue-encoding nucleic acid molecules from any desired species. Such molecules can be expressed to yield homologues by recombinant means.

[0101] (c) Antibodies

[0102] One aspect of the present invention concerns antibodies, single-chain antigen binding molecules, or other proteins that specifically bind to one or more of the protein or peptide molecules of the present invention and their homologues, fusions or fragments. Such antibodies may be used to quantitatively or qualitatively detect the protein or peptide molecules of the present invention. As used herein, an antibody or peptide is said to “specifically bind” to a protein or peptide molecule of the present invention if such binding is not competitively inhibited by the presence of non-related molecules.

[0103] Nucleic acid molecules that encode all or part of the protein of the present invention can be expressed, via recombinant means, to yield protein or peptides that can in turn be used to elicit antibodies that are capable of binding the expressed protein or peptide. Such antibodies may be used in immunoassays for that protein. Such protein-encoding molecules, or their fragments may be a “fusion” molecule (i.e., a part of a larger nucleic acid molecule) such that, upon expression, a fusion protein is produced. It is understood that any of the nucleic acid molecules of the present invention may be expressed, via recombinant means, to yield proteins or peptides encoded by these nucleic acid molecules.

[0104] The antibodies that specifically bind proteins and protein fragments of the present invention may be polyclonal or monoclonal, and may comprise intact immunoglobulins, or antigen binding portions of immunoglobulins (such as (F(ab′), F(ab′)₂) fragments, or single-chain immunoglobulins producible, for example, via recombinant means). It is understood that practitioners are familiar with the standard resource materials which describe specific conditions and procedures for the construction, manipulation and isolation of antibodies (see, for example, Harlow and Lane, In Antibodies: A Laboratory Manual, Cold Spring Harbor Press, Cold Spring Harbor, N.Y. (1988), the entirety of which is herein incorporated by reference).

[0105] Murine monoclonal antibodies are particularly preferred. BALB/c mice are preferred for this purpose, however, equivalent strains may also be used. The animals are preferably immunized with approximately 25 μg of purified protein (or fragment thereof) that has been emulsified a suitable adjuvant (such as TiterMax adjuvant (Vaxcel, Norcross, Ga.)). Immunization is preferably conducted at two intramuscular sites, one intraperitoneal site, and one subcutaneous site at the base of the tail. An additional i.v. injection of approximately 25 μg of antigen is preferably given in normal saline three weeks later. After approximately 11 days following the second injection, the mice may be bled and the blood screened for the presence of anti-protein or peptide antibodies. Preferably, a direct binding Enzyme-Linked Immunoassay (ELISA) is employed for this purpose.

[0106] More preferably, the mouse having the highest antibody titer is given a third i.v. injection of approximately 25 μg of the same protein or fragment. The splenic leukocytes from this animal may be recovered 3 days later, and are then permitted to fuse, most preferably, using polyethylene glycol, with cells of a suitable myeloma cell line (such as, for example, the P3X63Ag8.653 myeloma cell line). Hybridoma cells are selected by culturing the cells under “HAT” (hypoxanthine-aminopterin-thymine) selection for about one week. The resulting clones may then be screened for their capacity to produce monoclonal antibodies (“mAbs), preferably by direct ELISA.

[0107] In one embodiment, anti-protein or peptide monoclonal antibodies are isolated using a fusion of a protein, protein fragment, or peptide of the present invention, or conjugate of a protein, protein fragment, or peptide of the present invention, as immunogens. Thus, for example, a group of mice can be immunized using a fusion protein emulsified in Freund's complete adjuvant (e.g. approximately 50 μg of antigen per immunization). At three week intervals, an identical amount of antigen is emulsified in Freund's incomplete adjuvant and used to immunize the animals. Ten days following the third immunization, serum samples are taken and evaluated for the presence of antibody. If antibody titers are too low, a fourth booster can be employed. Polysera capable of binding the protein or peptide can also be obtained using this method.

[0108] In a preferred procedure for obtaining monoclonal antibodies, the spleens of the above-described immunized mice are removed, disrupted, and immune splenocytes are isolated over a ficoll gradient. The isolated splenocytes are fused, using polyethylene glycol with BALB/c-derived HGPRT (hypoxanthine guanine phosphoribosyl transferase) deficient P3×63xAg8.653 plasmacytoma cells. The fused cells are plated into 96-well microtiter plates and screened for hybridoma fusion cells by their capacity to grow in culture medium supplemented with hypothanthine, aminopterin and thymidine for approximately 2-3 weeks.

[0109] Hybridoma cells that arise from such incubation are preferably screened for their capacity to produce an immunoglobulin that binds to a protein of interest. An indirect ELISA may be used for this purpose. In brief, the supernatants of hybridomas are incubated in microtiter wells that contain immobilized protein. After washing, the titer of bound immunoglobulin can be determined using, for example, a goat anti-mouse antibody conjugated to horseradish peroxidase. After additional washing, the amount of immobilized enzyme is determined (for example through the use of a chromogenic substrate). Such screening is performed as quickly as possible after the identification of the hybridoma in order to ensure that a desired clone is not overgrown by non-secreting neighbors. Desirably, the fusion plates are screened several times since the rates of hybridoma growth vary. In a preferred sub-embodiment, a different antigenic form of immunogen may be used to screen the hybridoma. Thus, for example, the splenocytes may be immunized with one immunogen, but the resulting hybridomas can be screened using a different immunogen. It is understood that any of the protein or peptide molecules of the present invention may be used to raise antibodies.

[0110] As discussed below, such antibody molecules or their fragments may be used for diagnostic purposes. Where the antibodies are intended for diagnostic purposes, it may be desirable to derivatize them, for example with a ligand group (such as biotin) or a detectable marker group (such as a fluorescent group, a radioisotope or an enzyme).

[0111] The ability to produce antibodies that bind the protein or peptide molecules of the present invention permits the identification of mimetic compounds of those molecules. A “mimetic compound” is a compound that is not that compound, or a fragment of that compound, but which nonetheless exhibits an ability to specifically bind to antibodies directed against that compound.

[0112] It is understood that any of the agents of the present invention can be substantially purified and/or be biologically active and/or recombinant.

[0113] Uses of the Agents of the Invention

[0114] The nucleic acid molecules and fragments thereof of the present invention from the subtractive cDNA library LEB3229 are isolated from early lily ovary tissue harvested from plants at the pre-meiotic to meiotic stage. Libraries from this tissue can enable acquisition of, including but not limited to, genes that are involved in reproduction, female production and development. The ESTs of the present invention will find great use in the isolation of a variety of agronomically significant genes, including but not limited to, non-regulatory genes and genes that regulate microsporogenesis, meiosis, cell cycle, signal transduction, cell-cell communication, carotenoids, floral biogenesis, embryogenesis, protein, amino acids, sterols, oils, minerals, isoflavones, saponins, vitamins, tocopherols, antinutrient components, carbohydrates, and starch metabolism. Such genes are associated with plant growth, quality, yield, and could also serve as links in important developmental, metabolic, and catabolic pathways. The ESTs of the present invention also can enable the acquisition of female-specific promoters and cis-regulatory elements which will be useful to express agronomically significant genes in these tissues and/or other tissues. The ESTs of the present invention also can enable the acquisition of molecular markers, which can be used in, including but not limited to, breeding schemes, genetic and molecular mapping, and cloning of agronomically significant genes. Libraries from this tissue can enable the acquisition of a variety of agronomically significant genes involved in the synthesis and catabolism of commercially important traits.

[0115] The nucleic acid molecules and fragments thereof of the present invention from the subtractive cDNA library LIB3230 are isolated from late lily ovule tissue harvested from plants at the mitotic to mature ovule stage. Libraries from this tissue can enable acquisition of, including but not limited to, genes that are involved in reproduction, female production and development. The ESTs of the present invention will find great use in the isolation of a variety of agronomically significant genes, including but not limited to, non-regulatory genes and genes that regulate microsporogenesis, meiosis, cell cycle, signal transduction, cell-cell communication, carotenoids, floral biogenesis, embryogenesis, protein, amino acids, sterols, oils, minerals, isoflavones, saponins, vitamins, tocopherols, antinutrient components, carbohydrates, and starch metabolism. Such genes are associated with plant growth, quality, yield, and could also serve as links in important developmental, metabolic, and catabolic pathways. The ESTs of the present invention also can enable the acquisition of female-specific promoters and cis-regulatory elements which will be useful to express agronomically significant genes in these tissues and/or other tissues. The ESTs of the present invention also can enable the acquisition of molecular markers, which can be used in, including but not limited to, breeding schemes, genetic and molecular mapping, and cloning of agronomically significant genes. Libraries from this tissue can enable the acquisition of a variety of agronomically significant genes involved in the synthesis and catabolism of commercially important traits.

[0116] Nucleic acid molecules and fragments thereof of the present invention may be employed to obtain other nucleic acid molecules. Such molecules include the nucleic acid molecules of other plants or other organisms (e.g., alfalfa, rice, potato, cotton, oat, rye, barley, maize, wheat, Arabidopsis, Brassica, etc.) including the nucleic acid molecules that encode, in whole or in part, protein homologues of other plant species or other organisms, and sequences of genetic elements such as promoters and transcriptional regulatory elements. Such molecules can be readily obtained by using the above-described nucleic acid molecules or fragments thereof to screen cDNA or genomic libraries obtained from such plant species. Methods for forming such libraries are well known in the art. Such homologue molecules may differ in their nucleotide sequences from those found in one or more of SEQ ID NO:1 through SEQ ID NO:6041 or complements thereof because complete complementarity is not needed for stable hybridization. The nucleic acid molecules of the present invention therefore also include molecules that, although capable of specifically hybridizing with the nucleic acid molecules may lack “complete complementarity.”

[0117] Any of a variety of methods may be used to obtain one or more of the above-described nucleic acid molecules (Zamechik et al., Proc. Natl. Acad. Sci. (U.S.A.) 83:4143-4146 (1986); Goodchild et al., Proc. Natl. Acad. Sci. (U.S.A.) 85:5507-5511 (1988); Wickstrom et al., Proc. Natl. Acad. Sci. (U.S.A.) 85:1028-1032 (1988); Holt, et al., Molec. Cell. Biol. 8:963-973 (1988); Gerwirtz, et al., Science 242:1303-1306 (1988); Anfossi, et al., Proc. Natl. Acad. Sci. (U.S.A.) 86:3379-3383 (1989); Becker, et al., EMBO J. 8:3685-3691 (1989); all of which are herein incorporated by reference in their entirety). Automated nucleic acid synthesizers may be employed for this purpose. In lieu of such synthesis, the disclosed nucleic acid molecules may be used to define a pair of primers that can be used with the polymerase chain reaction (Mullis, et al., Cold Spring Harbor Symp. Quant. Biol. 51:263-273 (1986); Erlich et al., EP 50,424; EP 84,796, EP 258,017, EP 237,362; Mullis, EP 201,184; Mullis et al., U.S. Pat. No. 4,683,202; Erlich, U.S. Pat. No. 4,582,788; and Saiki, R. et al., U.S. Pat. No. 4,683,194, all of which are hereby incorporated by reference in their entirety) to amplify and obtain any desired nucleic acid molecule or fragment.

[0118] Promoter sequence(s) and other genetic elements including but not limited to transcriptional regulatory elements associated with one or more of the disclosed nucleic acid sequences can also be obtained using the disclosed nucleic acid sequences provided herein.

[0119] In one embodiment, such sequences are obtained by incubating EST nucleic acid molecules or preferably fragments thereof with members of genomic libraries (e.g. lily, cotton, wheat, maize and soybean) and recovering clones that hybridize to the EST nucleic acid molecule or fragment thereof. In a second embodiment, methods of “chromosome walking,” or inverse PCR may be used to obtain such sequences (Frohman, et al., Proc. Natl. Acad. Sci. (U.S.A.) 85:8998-9002 (1988); Ohara, et al., Proc. Natl. Acad. Sci. (U.S.A.) 86: 5673-5677 (1989); Pang et al., Biotechniques, 22(6); 1046-1048 (1977); Huang et al., Methods Mol. Biol. 69: 89-96 (1977); Hartl et al., Methods Mol. Biol. 58: 293-301 (1996), all of which are hereby incorporated by reference in their entirety). In one embodiment, the disclosed nucleic acid molecules are used to identify cDNAs whose analogous genes contain promoters with desirable expression patterns. The nucleic acid molecules isolated from the library of the present invention are used to isolate promoters of tissue-enhanced, tissue-specific, developmentally- or environmentally-regulated expression profiles. Isolation and functional analysis of the 5′ flanking promoter sequences of these genes from genomic libraries, for example, using genomic screening methods and PCR techniques would result in the isolation of useful promoters and transcriptional regulatory elements. These methods are known to those of skill in the art and have been described (See for example Birren et al., Genome Analysis: Analyzing DNA, 1, (1997), Cold Spring Harbor Laboratory Press, Cold Spring Harbor, N.Y., the entirety of which is herein incorporated by reference).

[0120] Promoters obtained utilizing the nucleic acid molecules of the present invention could also be modified to affect their control characteristics. Examples of such modifications would include but are not limited to enhancer sequences as reported by Kay et al., Science 236:1299 (1987), herein incorporated by reference in its entirety. Such genetic elements could be used to enhance gene expression of new and existing traits for crop improvements.

[0121] The nucleic acid molecules of the present invention may be used to isolate promoters of tissue enhanced. tissue specific, cell-specific, cell-type, developmentally or environmentally regulated expression profiles. Isolation and functional analysis of the 5′ flanking promoter sequences of these genes from genomic libraries, for example, using genomic screening methods and PCR techniques would result in the isolation of useful promoters and transcriptional regulatory elements. These methods are known to those of skill in the art and have been described (See, for example, Birren et. al., Genome Analysis: Analyzing DNA, 1, Cold Spring Harbor Laboratory Press, Cold Spring Harbor, N.Y. (1997), herein incorporated by reference in its entirety). Promoters obtained utilizing the nucleic acid molecules of the present invention could also be modified to affect their control characteristics. Examples of such modifications would include but are not limited to enhancer sequences as reported by Kay, et al Science 236:1299 (1987), herein incorporated reference in its entirety. Such genetic elements could be used to enhance gene expression of new and existing traits for crop improvements.

[0122] In an aspect of the present invention, one or more of the nucleic molecules of the present invention are used to determine whether a plant (preferably lily, corn, cotton, soybean and wheat) has a mutation affecting the level (i.e., the concentration of mRNA in a sample, etc.) or pattern (i.e., the kinetics of expression, rate of decomposition, stability profile, etc.) of the expression encoded in part or whole by one or more of the nucleic acid molecules of the present invention (collectively, the “Expression Response” of a cell or tissue). As used herein, the Expression Response manifested by a cell or tissue is said to be “altered” if it differs from the Expression Response of cells or tissues of plants not exhibiting the phenotype. To determine whether a Expression Response is altered, the Expression Response manifested by the cell or tissue of the plant exhibiting the phenotype is compared with that of a similar cell or tissue sample of a plant not exhibiting the phenotype. As will be appreciated, it is not necessary to re-determine the Expression Response of the cell or tissue sample of plants not exhibiting the phenotype each time such a comparison is made; rather, the Expression Response of a particular plant may be compared with previously obtained values of normal plants. As used herein, the phenotype of the organism is any of one or more characteristics of an organism (e.g. disease resistance, pest tolerance, environmental tolerance, male sterility, yield, quality improvements, etc.). A change in genotype or phenotype may be transient or permanent. Also as used herein, a tissue sample is any sample that comprises more than one cell. In a preferred aspect, a tissue sample comprises cells that share a common characteristic (e.g. derived from leaf, root, or pollen etc).

[0123] In one sub-aspect, such an analysis is conducted by determining the presence and/or identity of polymorphism(s) by one or more of the nucleic acid molecules of the present invention and more specifically, one or more of the EST nucleic acid molecules or fragments thereof which are associated with phenotype, or a predisposition to phenotype.

[0124] Any of a variety of molecules can be used to identify such polymorphism(s). In one embodiment, one or more of the EST nucleic acid molecules (or a sub-fragment thereof) may be employed as a marker nucleic acid molecule to identify such polymorphism(s). Alternatively, such polymorphisms can be detected through the use of a marker nucleic acid molecule or a marker protein that is genetically linked to (i.e., a polynucleotide that co-segregates with) such polymorphism(s).

[0125] In an alternative embodiment, such polymorphisms can be detected through the use of a marker nucleic acid molecule that is physically linked to such polymorphism(s). For this purpose, marker nucleic acid molecules comprising a nucleotide sequence of a polynucleotide located within 1 mb of the polymorphism(s), and more preferably within 100 kb of the polymorphism(s), and most preferably within 10 kb of the polymorphism(s) can be employed.

[0126] The genomes of animals and plants naturally undergo spontaneous mutation in the course of their continuing evolution (Gusella, Ann. Rev. Biochem. 55:831-854 (1986)). A “polymorphism” is a variation or difference in the sequence of the gene or its flanking regions that arises in some of the members of a species. The variant sequence and the “original” sequence co-exist in the species' population. In some instances, such co-existence is in stable or quasi-stable equilibrium.

[0127] A polymorphism is thus said to be “allelic,” in that, due to the existence of the polymorphism, some members of a species may have the original sequence (i.e., the original “allele”) whereas other members may have the variant sequence (i.e., the variant “allele”). In the simplest case, only one variant sequence may exist, and the polymorphism is thus said to be di-allelic. In other cases, the species' population may contain multiple alleles, and the polymorphism is termed tri-allelic, etc. A single gene may have multiple different unrelated polymorphisms. For example, it may have a di-allelic polymorphism at one site, and a multi-allelic polymorphism at another site.

[0128] The variation that defines the polymorphism may range from a single nucleotide variation to the insertion or deletion of extended regions within a gene. In some cases, the DNA sequence variations are in regions of the genome that are characterized by short tandem repeats (STRs) that include tandem di- or tri-nucleotide repeated motifs of nucleotides. Polymorphisms characterized by such tandem repeats are referred to as “variable number tandem repeat” (“VNTR”) polymorphisms. VNTRs have been used in identity analysis (Weber, U.S. Pat. No. 5,075,217; Armour, et al., FEBS Lett. 307:113-115 (1992); Jones, et al., Eur. J. Haematol. 39:144-147 (1987); Horn, et al., PCT Application WO91/14003; Jeffreys, European Patent Application 370,719; Jeffreys, U.S. Pat. No. 5,699,082; Jeffreys. et al., Amer. J. Hum. Genet. 39:11-24 (1986); Jeffreys. et al., Nature 316:76-79 (1985); Gray, et al., Proc. R. Acad. Soc. Lond. 243:241-253 (1991); Moore, et al., Genomics 10:654-660 (1991); Jeffreys, et al., Anim. Genet. 18:1-15 (1987); Hillel, et al., Anim. Genet. 20:145-155 (1989); Hillel, et al., Genet. 124:783-789 (1990), all of which are herein incorporated by reference in their entirety).

[0129] The detection of polymorphic sites in a sample of DNA may be facilitated through the use of nucleic acid amplification methods. Such methods specifically increase the concentration of polynucleotides that span the polymorphic site, or include that site and sequences located either distal or proximal to it. Such amplified molecules can be readily detected by gel electrophoresis or other means.

[0130] The most preferred method of achieving such amplification employs the polymerase chain reaction (“PCR”) (Mullis, et al., Cold Spring Harbor Symp. Quant. Biol. 51:263-273 (1986); Erlich, et al., European Patent Appln. 50,424; European Patent Appln. 84,796, European Patent Application 258,017, European Patent Appln. 237,362; Mullis, European Patent Appln. 201,184; Mullis, et al., U.S. Pat. No. 4,683,202; Erlich., U.S. Pat. No. 4,582,788; and Saiki, et al., U.S. Pat. No. 4,683,194, all of which are herein incorporated by reference), using primer pairs that are capable of hybridizing to the proximal sequences that define a polymorphism in its double-stranded form.

[0131] In lieu of PCR, alternative methods, such as the “Ligase Chain Reaction” (“LCR”) may be used (Barany, Proc. Natl. Acad. Sci. (U.S.A) 88:189-193 (1991), the entirety of which is herein incorporated by reference). LCR uses two pairs of oligonucleotide probes to exponentially amplify a specific target. The sequences of each pair of oligonucleotides is selected to permit the pair to hybridize to abutting sequences of the same strand of the target. Such hybridization forms a substrate for a template-dependent ligase. As with PCR, the resulting products thus serve as a template in subsequent cycles and an exponential amplification of the desired sequence is obtained.

[0132] LCR can be performed with oligonucleotides having the proximal and distal sequences of the same strand of a polymorphic site. In one embodiment, either oligonucleotide will be designed to include the actual polymorphic site of the polymorphism. In such an embodiment, the reaction conditions are selected such that the oligonucleotides can be ligated together only if the target molecule either contains or lacks the specific nucleotide that is complementary to the polymorphic site present on the oligonucleotide. Alternatively, the oligonucleotides may be selected such that they do not include the polymorphic site (see, Segev, PCT Application WO 90/01069, the entirety of which is herein incorporated by reference).

[0133] The “Oligonucleotide Ligation Assay” (“OLA”) may alternatively be employed (Landegren, et al., Science 241:1077-1080 (1988), herein incorporated by reference in its entirety). The OLA protocol uses two oligonucleotides which are designed to be capable of hybridizing to abutting sequences of a single strand of a target. OLA, like LCR, is particularly suited for the detection of point mutations. Unlike LCR, however, OLA results in “linear” rather than exponential amplification of the target sequence.

[0134] Nickerson, et al. have described a nucleic acid detection assay that combines attributes of PCR and OLA (Nickerson, et al., Proc. Natl. Acad. Sci. (U.S.A.) 87:8923-8927 (1990), the entirety of which is herein incorporated by reference). In this method, PCR is used to achieve the exponential amplification of target DNA, which is then detected using OLA. In addition to requiring multiple, and separate, processing steps, one problem associated with such combinations is that they inherit all of the problems associated with PCR and OLA.

[0135] Schemes based on ligation of two (or more) oligonucleotides in the presence of nucleic acid having the sequence of the resulting “di-oligonucleotide”, thereby amplifying the di-oligonucleotide, are also known (Wu, et al., Genomics 4:560 (1989), the entirety of which is herein incorporated by reference), and may be readily adapted to the purposes of the present invention.

[0136] Other known nucleic acid amplification procedures, such as allele-specific oligomers, branched DNA technology, transcription-based amplification systems, or isothermal amplification methods may also be used to amplify and analyze such polymorphisms (Malek, et al., U.S. Pat. No. 5,130,238; Davey, et al., European Patent Application 329,822; Schuster et al., U.S. Pat. No. 5,169,766; Miller, et al., PCT Application WO 89/06700; Kwoh, et al., Proc. Natl. Acad. Sci. (U.S.A.) 86:1173-1177 (1989); Gingeras, et al., PCT Application WO 88/10315; Walker, et al., Proc. Natl. Acad. Sci. (U.S.A.) 89:392-396 (1992), all of which are herein incorporated by reference in their entirety).

[0137] The identification of a polymorphism can be determined in a variety of ways. By correlating the presence or absence of it in a plant with the presence or absence of a phenotype, it is possible to predict the phenotype of that plant. If a polymorphism creates or destroys a restriction endonuclease cleavage site, or if it results in the loss or insertion of DNA (e.g., a VNTR polymorphism), it will alter the size or profile of the DNA fragments that are generated by digestion with that restriction endonuclease. As such, individuals that possess a variant sequence can be distinguished from those having the original sequence by restriction fragment analysis. Polymorphisms that can be identified in this manner are termed “restriction fragment length polymorphisms” (“RFLPs”). RFLPs have been widely used in human and plant genetic analyses (Glassberg, UK Patent Application 2135774; Skolnick, et al., Cytogen. Cell Genet. 32:58-67 (1982); Botstein, et al., Ann. J. Hum. Genet. 32:314-331 (1980); Fischer, et al. (PCT Application WO90/13668); Uhlen, PCT Application WO90/11369).

[0138] Polymorphisms can also be identified by Single Strand Conformation Polymorphism (SSCP) analysis. The SSCP technique is a method capable of identifying most sequence variations in a single strand of DNA, typically between 150 and 250 nucleotides in length (Elles, Methods in Molecular Medicine: Molecular Diagnosis of Genetic Diseases, Humana Press (1996); Orita et al., Genomics 5: 874-879 (1989); both of which are herein incorporated by reference in their entirety). Under denaturing conditions a single strand of DNA will adopt a conformation that is uniquely dependent on its sequence conformation. This conformation usually will be different, even if only a single base is changed. Most conformations have been reported to alter the physical configuration or size sufficiently to be detectable by electrophoresis. A number of protocols have been described for SSCP including, but not limited to Lee et al., Anal. Biochem. 205: 289-293 (1992), the entirety of which is herein incorporated by reference; Suzuki et al., Anal. Biochem. 192: 82-84 (1991), the entirety of which is herein incorporated by reference; Lo et al., Nucleic Acids Research 20: 1005-1009 (1992), the entirety of which is herein incorporated by reference; Sarkar et al., Genomics 13: 441-443 (1992), the entirety of which is herein incorporated by reference). It is understood that one or more of the nucleic acids of the present invention, may be utilized as markers or probes to detect polymorphisms by SSCP analysis.

[0139] Polymorphisms may also be found using a DNA fingerprinting technique called amplified fragment length polymorphism (AFLP), which is based on the selective PCR amplification of restriction fragments from a total digest of genomic DNA to profile that DNA. Vos, et al., Nucleic Acids Res. 23:4407-4414 (1995), the entirety of which is herein incorporated by reference. This method allows for the specific co-amplification of high numbers of restriction fragments, which can be visualized by PCR without knowledge of the nucleic acid sequence.

[0140] AFLP employs basically three steps. Initially, a sample of genomic DNA is cut with restriction enzymes and oligonucleotide adapters are ligated to the restriction fragments of the DNA. The restriction fragments are then amplified using PCR by using the adapter and restriction sequence as target sites for primer annealing. The selective amplification is achieved by the use of primers that extend into the restriction fragments, amplifying only those fragments in which the primer extensions match the nucleotide flanking the restriction sites. These amplified fragments are then visualized on a denaturing polyacrylamide gel.

[0141] AFLP analysis has been performed on Salix (Beismann, et al., Mol. Ecol. 6:989-993 (1997), herein incorporated by reference in its entirety); Acinetobacter (Janssen, et al., Int. J. Syst. Bacteriol 47:1179-1187 (1997), herein incorporated by reference in its entirety), Aeromonas popoffi (Huys, et al., Int. J. Syst. Bacteriol. 47:1165-1171 (1997), herein incorporated by reference in its entirety), rice (McCouch, et al., Plant Mol. Biol. 35:89-99 (1997); Nandi, et al., Mol. Gen. Genet. 255:1-8 (1997); Cho, et al., Genome 39:373-378 (1996), all of which are herein incorporated by reference in their entirety), barley (Hordeum vulgare) (Simons, et al., Genomics 44:61-70 (1997); Waugh, et al., Mol. Gen. Genet. 255:311-321 (1997); Qi, et al., Mol. Gen. Genet. 254:330-336 (1997); Becker, et al., Mol. Gen. Genet. 249:65-73 (1995), all of which are herein incorporated by reference in their entirety), potato (Van der Voort, et al., Mol. Gen. Genet. 255:438-447 (1997); Meksem, et al., Mol. Gen. Genet. 249:74-81 (1995), both of which are herein incorporated by reference in their entirety), Phytophthora infestans (Van der Lee, et al., Fungal Genet. Biol. 21:278-291 (1997), herein incorporated by reference in its entirety), Bacillus anthracis (Keim, et al., J. Bacteriol. 179:818-824 (1997), herein incorporated by reference in its entirety), Astragalus cremnophylax (Travis, et al., Mol. Ecol. 5:735-745 (1996), herein incorporated by reference in its entirety), Arabidopsis (Cnops, et al., Mol. Gen. Genet. 253:32-41 (1996), herein incorporated by reference in its entirety), Escherichia coli (Lin, et al., Nucleic Acids Res. 24:3649-3650 (1996), herein incorporated by reference in its entirety), Aeromonas (Huys, et al., Int. J. Syst. Bacteriol. 46:572-580 (1996), herein incorporated by reference in its entirety), nematode (Folkertsma, et al., Mol. Plant. Microbe Interact. 9:47-54 (1996), herein incorporated by reference in its entirety), tomato (Thomas, et al., Plant J. 8:785-794 (1995), herein incorporated by reference in its entirety), and human (Latorra, et al., PCR Methods Appl. 3:351-358 (1994), herein incorporated by reference in its entirety). AFLP analysis has also been used for fingerprinting mRNA (Money, et al., Nucleic Acids Res. 24:2616-2617 (1996); Bachem, et al., Plant J. 9:745-753 (1996), both of which are herein incorporated by reference in their entirety). It is understood that one or more of the nucleic acids of the present invention, may be utilized as markers or probes to detect polymorphisms by AFLP analysis for fingerprinting mRNA.

[0142] Polymorphisms may also be found using random amplified polymorphic DNA (RAPD) (Williams et al., Nucl. Acids Res. 18: 6531-6535 (1990), herein incorporated by reference in its entirety) and cleaveable amplified polymorphic sequences (CAPS) (Lyamichev et al., Science 260: 778-783 (1993), herein incorporated by reference in its entirety). It is understood that one or more of the nucleic acids of the present invention, may be utilized as markers or probes to detect polymorphisms by RAPD or CAPS analysis.

[0143] Polymorphisms are useful, through linkage analysis, to define the genetic distances or physical distances between polymorphic traits. A physical map or ordered array of genomic DNA fragments in the desired region containing the gene may be used to characterize and isolate genes corresponding to desirable traits. For this purpose, yeast artificial chromosomes (YACs), bacterial artificial chromosomes (BACs), and cosmids are appropriate vectors for cloning large segments of DNA molecules. Although fewer clones are needed to make a contig for a specific genomic region by using YACs (Agyare et al., Genome Res. 7: 1-9 (1997); James et al., Genomics 32: 425-430 (1996), both of which are herein incorporated by reference in their entirety), chimerism in the inserted DNA fragment can arise. Cosmids are convenient for handling smaller-size DNA molecules and may be used for transformation in developing transgenic plants. BACs also carry DNA fragments and are less prone to chimerism.

[0144] Through genetic mapping, a fine scale linkage map can be developed using DNA markers and, then, a genomic DNA library of large-sized fragments can be screened with molecular markers linked to the desired trait. Molecular markers are advantageous for agronomic traits that are otherwise difficult to tag, such as resistance to pathogens, insects and nematodes, tolerance to abiotic stress, quality parameters and quantitative traits such as high yield potential.

[0145] The essential requirements for marker-assisted selection in a plant breeding program are: (1) the marker(s) should co-segregate or be closely linked with the desired trait; (2) an efficient means of screening large populations for the molecular marker(s) should be available; and (3) the screening technique should have high reproducibility across laboratories and preferably be economical to use and be user-friendly.

[0146] The genetic linkage of marker molecules can be established by a gene mapping model such as, without limitation, the flanking marker model reported by Lander and Botstein, Genetics 121:185-199 (1989) and the interval mapping, based on maximum likelihood methods described by Lander and Botstein, Genetics 121:185-199 (1989) and implemented in the software package MAPMAKER/QTL (Lincoln and Lander, Mapping Genes Controlling Quantitative Traits Using MAPMAKER/QTL, Whitehead Institute for Biomedical Research, Massachusetts, (1990). Additional software includes Qgene, Version 2.23 (1996), Department of Plant Breeding and Biometry, 266 Emerson Hall, Cornell University, Ithaca, N.Y., the manual of which is herein incorporated by reference in its entirety). Use of Qgene software is a particularly preferred approach.

[0147] A maximum likelihood estimate (MLE) for the presence of a marker is calculated, together with an MLE assuming no QTL effect, to avoid false positives. A log₁₀ of an odds ratio (LOD) is then calculated as: LOD=log₁₀(MLE for the presence of a QTL/MLE given no linked QTL).

[0148] The LOD score essentially indicates how much more likely the data are to have arisen assuming the presence of a QTL than in its absence. The LOD threshold value for avoiding a false positive with a given confidence, say 95%, depends on the number of markers and the length of the genome. Graphs indicating LOD thresholds are set forth in Lander and Botstein, Genetics 121:185-199 (1989) the entirety of which is herein incorporated by reference and further described by Arús and Moreno-González, Plant Breeding, Hayward et al., (eds.) Chapman & Hall, London, pp. 314-331 (1993), the entirety of which is herein incorporated by reference.

[0149] Additional models can be used. Many modifications and alternative approaches to interval mapping have been reported, including the use of non-parametric methods (Kruglyak and Lander, Genetics 139:1421-1428 (1995), the entirety of which is herein incorporated by reference). Multiple regression methods or models can be also be used, in which the trait is regressed on a large number of markers (Jansen, Biometrics in Plant Breeding, van Oijen and Jansen (eds.), Proceedings of the Ninth Meeting of the Eucarpia Section Biometrics in Plant Breeding, The Netherlands, pp. 116-124 (1994); Weber and Wricke, Advances in Plant Breeding, Blackwell, Berlin, 16 (1994), both of which are herein incorporated by reference in their entirety). Procedures combining interval mapping with regression analysis, whereby the phenotype is regressed onto a single putative QTL at a given marker interval and at the same time onto a number of markers that serve as ‘cofactors,’ have been reported by Jansen and Stam, Genetics 136:1447-1455 (1994), the entirety of which is herein incorporated by reference and Zeng, Genetics 136:1457-1468 (1994) the entirety of which is herein incorporated by reference. Generally, the use of cofactors reduces the bias and sampling error of the estimated QTL positions (Utz and Melchinger, Biometrics in Plant Breeding, van Oijen and Jansen (eds.) Proceedings of the Ninth Meeting of the Eucarpia Section Biometrics in Plant Breeding, The Netherlands, pp. 195-204 (1994), the entirety of which is herein incorporated by reference, thereby improving the precision and efficiency of QTL mapping (Zeng, Genetics 136:1457-1468 (1994)). These models can be extended to multi-environment experiments to analyze genotype-environment interactions (Jansen et al., Theo. Appl. Genet. 91:33-37 (1995), the entirety of which is herein incorporated by reference).

[0150] Selection of an appropriate mapping population is important to map construction. The choice of an appropriate mapping population depends on the type of marker systems employed (Tanksley et al., Molecular mapping plant chromosomes. Chromosome structure and function: Impact of new concepts, Gustafson and Appels (eds.), Plenum Press, New York, pp 157-173 (1988), the entirety of which is herein incorporated by reference). Consideration must be given to the source of parents (adapted vs. exotic) used in the mapping population. Chromosome pairing and recombination rates can be severely disturbed (suppressed) in wide crosses (adapted×exotic) and generally yield greatly reduced linkage distances. Wide crosses will usually provide segregating populations with a relatively large array of polymorphisms when compared to progeny in a narrow cross (adapted×adapted).

[0151] An F₂ population is the first generation of selfing after the hybrid seed is produced. Usually a single F₁ plant is selfed to generate a population segregating for all the genes in Mendelian (1:2:1) fashion. Maximum genetic information is obtained from a completely classified F₂ population using a codominant marker system (Mather, Measurement of Linkage in Heredity, Methuen and Co., (1938), the entirety of which is herein incorporated by reference). In the case of dominant markers, progeny tests (e.g. F₃, BCF₂) are required to identify the heterozygotes, thus making it equivalent to a completely classified F₂ population. However, this procedure is often prohibitive because of the cost and time involved in progeny testing. Progeny testing of F₂ individuals is often used in map construction where phenotypes do not consistently reflect genotype (e.g. disease resistance) or where trait expression is controlled by a QTL. Segregation data from progeny test populations (e.g. F₃ or BCF₂) can be used in map construction. Marker-assisted selection can then be applied to cross progeny based on marker-trait map associations (F₂, F₃), where linkage groups have not been completely disassociated by recombination events (i.e., maximum disequilibrium).

[0152] Recombinant inbred lines (RIL) (genetically related lines; usually >F₅, developed from continuously selfing F₂ lines towards homozygosity) can be used as a mapping population. Information obtained from dominant markers can be maximized by using RIL because all loci are homozygous or nearly so. Under conditions of tight linkage (i.e., about <10% recombination), dominant and co-dominant markers evaluated in RIL populations provide more information per individual than either marker type in backcross populations (Reiter et al., Proc. Natl. Acad. Sci. (U.S.A.) 89:1477-1481 (1992), the entirety of which is herein incorporated by reference). However, as the distance between markers becomes larger (i.e., loci become more independent), the information in RIL populations decreases dramatically when compared to codominant markers.

[0153] Backcross populations (e.g., generated from a cross between a successful variety (recurrent parent) and another variety (donor parent) carrying a trait not present in the former) can be utilized as a mapping population. A series of backcrosses to the recurrent parent can be made to recover most of its desirable traits. Thus a population is created consisting of individuals nearly like the recurrent parent but each individual carries varying amounts or mosaic of genomic regions from the donor parent. Backcross populations can be useful for mapping dominant markers if all loci in the recurrent parent are homozygous and the donor and recurrent parent have contrasting polymorphic marker alleles (Reiter et al., Proc. Natl. Acad. Sci. (U.S.A.) 89:1477-1481 (1992)). Information obtained from backcross populations using either codominant or dominant markers is less than that obtained from F₂ populations because one, rather than two, recombinant gametes are sampled per plant. Backcross populations, however, are more informative (at low marker saturation) when compared to RILs as the distance between linked loci increases in RIL populations (i.e. about 15% recombination). Increased recombination can be beneficial for resolution of tight linkages, but may be undesirable in the construction of maps with low marker saturation.

[0154] Near-isogenic lines (NIL) created by many backcrosses to produce an array of individuals that are nearly identical in genetic composition except for the trait or genomic region under interrogation can be used as a mapping population. In mapping with NILs, only a portion of the polymorphic loci are expected to map to a selected region.

[0155] Bulk segregant analysis (BSA) is a method developed for the rapid identification of linkage between markers and traits of interest (Michelmore et al., Proc. Natl. Acad. Sci. (U.S.A.) 88:9828-9832 (1991), the entirety of which is herein incorporated by reference). In BSA, two bulked DNA samples are drawn from a segregating population originating from a single cross. These bulks contain individuals that are identical for a particular trait (resistant or susceptible to particular disease) or genomic region but arbitrary at unlinked regions (i.e. heterozygous). Regions unlinked to the target region will not differ between the bulked samples of many individuals in BSA.

[0156] It is understood that one or more of the nucleic acid molecules of the present invention may be used as molecular markers. It is also understood that one or more of the protein molecules of the present invention may be used as molecular markers.

[0157] In accordance with this aspect of the present invention, a sample nucleic acid is obtained from plants cells or tissues. Any source of nucleic acid may be used. Preferably, the nucleic acid is genomic DNA. The nucleic acid is subjected to restriction endonuclease digestion. For example, one or more EST nucleic acid molecule or fragment thereof can be used as a probe in accordance with the above-described polymorphic methods. The polymorphism obtained in this approach can then be cloned to identify the mutation at the coding region which alters the protein's structure or regulatory region of the gene which affects its expression level.

[0158] In one aspect of the present invention, an evaluation can be conducted to determine whether a particular mRNA molecule is present. One or more of the nucleic acid molecules of the present invention, preferably one or more of the EST nucleic acid molecules of the present invention are utilized to detect the presence or quantity of the mRNA species. Such molecules are then incubated with cell or tissue extracts of a plant under conditions sufficient to permit nucleic acid hybridization. The detection of double-stranded probe-mRNA hybrid molecules is indicative of the presence of the mRNA; the amount of such hybrid formed is proportional to the amount of mRNA. Thus, such probes may be used to ascertain the level and extent of the mRNA production in a plant's cells or tissues. Such nucleic acid hybridization may be conducted under quantitative conditions (thereby providing a numerical value of the amount of the mRNA present). Alternatively, the assay may be conducted as a qualitative assay that indicates either that the mRNA is present, or that its level exceeds a user set, predefined value.

[0159] A principle of in situ hybridization is that a labeled, single-stranded nucleic acid probe will hybridize to a complementary strand of cellular DNA or RNA and, under the appropriate conditions, these molecules will form a stable hybrid. When nucleic acid hybridization is combined with histological techniques, specific DNA or RNA sequences can be identified within a single cell. An advantage of in situ hybridization over more conventional techniques for the detection of nucleic acids is that it allows an investigator to determine the precise spatial population (Angerer et al., Dev. Biol. 101: 477-484 (1984); Angerer et al., Dev. Biol. 112: 157-166 (1985); Dixon et al., EMBO J. 10: 1317-1324 (1991), all of which are herein incorporated by reference in their entirety). In situ hybridization may be used to measure the steady-state level of RNA accumulation. It is a sensitive technique and RNA sequences present in as few as 5-10 copies per cell can be detected (Hardin et al., J. Mol. Biol. 202: 417-431. (1989), the entirety of which is herein incorporated by reference). A number of protocols have been devised for in situ hybridization, each with tissue preparation, hybridization, and washing conditions (Meyerowitz, Plant Mol. Biol. Rep. 5: 242-250 (1987); Cox and Goldberg, In: Plant Molecular Biology: A Practical Approach (ed. C. H. Shaw), pp. 1-35. IRL Press, Oxford (1988); Raikhel et al., In situ RNA hybridization in plant tissues. In Plant Molecular Biology Manual, vol. B9: 1-32. Kluwer Academic Publisher, Dordrecht, Belgium (1989), all of which are herein incorporated by reference in their entirety).

[0160] In situ hybridization also allows for the localization of proteins within a tissue or cell (Wilkinson, In Situ Hybridization, Oxford University Press, Oxford (1992); Langdale, In Situ Hybridization 165-179 In: The Maize Handbook, eds. Freeling and Walbot, Springer-Verlag, New York (1994), both of which are herein incorporated by reference in their entirety). It is understood that one or more of the molecules of the present invention, preferably one or more of the EST nucleic acid molecules of the present invention or one or more of the antibodies of the present invention may be utilized to detect the level or pattern of a protein or fragment thereof by in situ hybridization.

[0161] Fluorescent in situ hybridization also enables the localization of a particular DNA sequence along a chromosome which is useful, among other uses, for gene mapping, following chromosomes in hybrid lines or detecting chromosomes with translocations, transversions or deletions. In situ hybridization has been used to identify chromosomes in several plant species (Griffor et al., Plant Mol. Biol. 17: 101-109 (1991); Gustafson et al., Proc. Nat'l. Acad. Sci. (U.S.A.). 87: 1899-1902 (1990); Mukai and Gill, Genome 34: 448-452. (1991); Schwarzacher and Heslop-Harrison, Genome 34:317-323 (1991); Wang et al., Jpn. J. Genet. 66:313-316 (1991); Parra and Windle, Nature Genetics, 5: 17-21 (1993), all of which are herein incorporated by reference in their entirety). It is understood that the nucleic acid molecules of the present invention may be used as probes or markers to localize sequences along a chromosome.

[0162] It is also understood that one or more of the molecules of the present invention, preferably one or more of the EST nucleic acid molecules of the present invention or one or more of the antibodies of the present invention may be utilized to detect the expression level or pattern of a protein or mRNA thereof by in situ hybridization.

[0163] Another method to localize the expression of a molecule is tissue printing. Tissue printing provides a way to screen, at the same time on the same membrane many tissue sections from different plants or different developmental stages. Tissue-printing procedures utilize films designed to immobilize proteins and nucleic acids. In essence, a freshly cut section of an organ is pressed gently onto nitrocellulose paper, nylon membrane or polyvinylidene difluoride membrane. Such membranes are commercially available (e.g. Millipore, Bedford, Mass.). The contents of the cut cell transfer onto the membrane, and the molecules are immobilized to the membrane. The immobilized molecules form a latent print that can be visualized with appropriate probes. When a plant tissue print is made on nitrocellulose paper, the cell walls leave a physical print that makes the anatomy visible without further treatment (Varner and Taylor, Plant Physiol. 91: 31-33 (1989), the entirety of which is herein incorporated by reference).

[0164] Tissue printing on substrate films is described by Daoust, Exp. Cell Res. 12: 203-211 (1957), the entirety of which is herein incorporated by reference, who detected amylase, protease, ribonuclease, and deoxyribonuclease in animal tissues using starch, gelatin, and agar films. These techniques can be applied to plant tissues (Yomo and Taylor, Planta 112:35-43 (1973); Harris and Chrispeels, Plant Physiol. 56: 292-299 (1975). Advances in membrane technology have increased the range of applications of Daoust's tissue-printing techniques allowing (Cassab and Varner, J. Cell. Biol. 105: 2581-2588 (1987), the entirety of which is herein incorporated by reference; the histochemical localization of various plant enzymes and deoxyribonuclease on nitrocellulose paper and nylon (Spruce et al., Phytochemistry, 26: 2901-2903 (1987); Barres et al. Neuron 5: 527-544 (1990); Reid and Pont-Lezica, Tissue Printing: Tools for the Study of Anatomy, Histochemistry, and Gene Expression, Academic Press, New York, N.Y. (1992); Reid et al. Plant Physiol. 93: 160-165 (1990); Ye et al. Plant J. 1: 175-183 (1991), all of which are herein incorporated by reference in their entirety).

[0165] It is understood that one or more of the molecules of the present invention, preferably one or more of the EST nucleic acid molecules of the present invention or one or more of the antibodies of the present invention may be utilized to detect the presence or quantity of a protein by tissue printing.

[0166] Further, it is also understood that any of the nucleic acid molecules of the present invention may be used as marker nucleic acids and or probes in connection with methods that require probes or marker nucleic acids. As used herein, a probe is an agent that is utilized to determine an attribute or feature (e.g. presence or absence, location, correlation, etc.) or a molecule, cell, tissue or plant. As used herein, a marker nucleic acid is a nucleic acid molecule that is utilized to determine an attribute or feature (e.g., presence or absence, location, correlation, etc.) or a molecule, cell, tissue or plant.

[0167] A microarray-based method for high-throughput monitoring of gene expression may be utilized to measure expression response Schena et al., Science 270:467-470 (1995); on the website cmgm.stanford.edu/prown/array.html; Shalon, Ph.D. Thesis, Stanford University (1996). This approach is based on using arrays of DNA targets (e.g. cDNA inserts, colonies, or polymerase chain reaction products) for hybridization to a “complex probe” prepared with RNA extracted from a given cell line or tissue. The probe may be produced by reverse transcription of mRNA or total RNA and labeled with radioactive or fluorescent labeling. The probe is complex in that it contains many different sequences in various amounts, corresponding to the numbers of copies of the original mRNA species extracted from the sample.

[0168] The initial RNA source will typically be derived from a physiological source. The physiological source may be derived from a variety of eukaryotic sources, with physiological sources of interest including sources derived from single celled organisms such as yeast and multicellular organisms, including plants and animals, particularly plants, where the physiological sources from multicellular organisms may be derived from particular organs or tissues of the multicellular organism, or from isolated cells derived therefrom. The physiological sources may be derived from multicellular organisms at different developmental stages (e.g., 10-day-old seedlings), grown under different environmental conditions (e.g., drought-stressed plants) or treated with chemicals.

[0169] In obtaining the sample of RNAs to be analyzed from the physiological source from which it is derived, the physiological source may be subjected to a number of different processing steps, where such processing steps might include tissue homogenation, cell isolation and cytoplasmic extraction, nucleic acid extraction and the like, where such processing steps are known to the those of skill in the art. Methods of isolating RNA from cells, tissues, organs or whole organisms are known to those of skill in the art and are described in Maniatis et al., Molecular Cloning: A Laboratory Manual (Cold Spring Harbor Press) (1989).

[0170] The DNA may be placed on nylon or glass “microarrays” regularly arranged with a spot spacing of 1 mm or less. Expression levels can be measured for hundreds or thousands of genes, by using less than 2 micrograms of polyA+RNA and determining the relative mRNA abundances down to one in ten thousand or less (Granjeaud et. al., BioEssays 21:781-790 (1999)).

[0171] As disclosed in U.S. Pat. No. 5,445,934 arrays with nucleic acid molecules can comprise a substrate with a surface comprising 10³ or more groups of oligonucleotides with different, known sequences covalently attached to the surface in discrete known regions, e.g. 10⁴ or 10⁵ or 10⁶ or more different groups of known sequences in discrete known regions. In preferred arrays 10³ or more groups of oligonucleotides occupy a total area of less than 1 cm². In preferred embodiments the groups of oligonucleotides are at least 50% pure within the discrete known regions.

[0172] In addition to arrays of cDNA clones or inserts, arrays of oligonucleotides are also used to study differential gene expression. In an oligonucleotide array, the genes of interest are represented by a series of approximately 20 nucleotide oligomers that are unique to each gene. Labeled mRNA is prepared and hybridization signals are detected from specific sets of oligos that represent different genes supplemented by a set of control oligonucleotides. Potential advantages of the oligonucleotide array include enhanced specificity and sensitivity through the parallel analysis of “perfect match” oligos and “mismatch” oligos for each gene. The hybridization conditions can be adjusted to distinguish a perfect heteroduplex from a single base mismatch, thus allowing subtraction of nonspecific hybridization signals from specific hybridization signals. A disadvantage of oligonucleotide arrays relative to cDNA arrays is the limitation of the technology to genes of known sequence (Granjeaud et. al., BioEssays 21:781-790 (1991); Carulli et al., Journal of Cellular Biochemistry Supplements 30/31:286-296 (1998)).

[0173] These techniques have been successfully used to characterize patterns of gene expression associated with, for example, various important physiological changes in yeast, including the mitotic cell cycle, the heat shock response, and comparison between mating types. Once a set of comparable expression profiles is obtained, e.g. for cells at different time points or at different cellular states, a clustering algorithm generally is used to group sets of genes which share similar expression patterns. The clusters obtained can then be analyzed in the light of available functional annotations, often leading to associations of poorly characterized genes with genes whose function and regulation are better understood.

[0174] Regulatory networks that control gene expression can be characterized using microarray technology (DeRisi et al., Science 278: 680-686 (1997); Winzler et al. Science 28: 1194-1197 (1998); Cho et al. Mol Cell 2: 65-73 (1998); Spellman et al. Mol Biol Cell 95: 14863-14868 (1998). For example, it is has been reported that both cDNA and oligonucleotide arrays have been used to monitor gene expression in synchronized cell cultures. Analysis of the corresponding temporal patterns of gene expression resulted in the identification of over 400 cell cycle-regulated genes. In order to identify possible common regulatory mechanisms accounting for co-expression, consensus motifs in putative regulatory sequences upstream of the corresponding ORFs were examined. This resulted in the identification of several new potential binding sites for known factors or complexes involved in the coordinated transcription of genes during specific phases of the cell cycle (Thieffry, D. BioEssays 21: 895-899 (1999)).

[0175] The microarray approach may be used with polypeptide targets (U.S. Pat. No. 5,445,934; U.S. Pat. No. 5,143,854; U.S. Pat. No. 5,079,600; U.S. Pat. No. 4,923,901) synthesized on a substrate (microarray) and these polypeptides can be screened with either (Fodor et al., Science 251:767-773 (1991)). It is understood that one or more of the nucleic acid molecules or protein or fragments thereof of the invention may be utilized in a microarray-based method.

[0176] In a preferred embodiment of the present invention microarrays may be prepared that comprise nucleic acid molecules where preferably at least 10%, preferably at least 25%, more preferably at least 50% and even more preferably at least 75%, 80%, 85%, 90% or 95% of the nucleic acid molecules located on that array are selected from the group of nucleic acid molecules that specifically hybridize to one or more nucleic acid molecule having a nucleic acid sequence selected from the group of SEQ ID NO: 1 through SEQ ID NO: 6041 or complement thereof or fragments of either.

[0177] A particular preferred microarray embodiment of the present invention is a microarray comprising nucleic acid molecules encoding genes or fragments thereof that are homologues of known genes or nucleic acid molecules that comprise genes or fragment thereof that elicit only limited or no matches to known genes. A further preferred microarray embodiment of the present invention is a microarray comprising nucleic acid molecules having genes or fragments thereof that are homologues of known genes and nucleic acid molecules that comprise genes or fragment thereof that elicit only limited or no matches to known genes. Site-directed mutagenesis may be utilized to modify nucleic acid sequences, particularly as it is a technique that allows one or more of the amino acids encoded by a nucleic acid molecule to be altered (e.g. a threonine to be replaced by a methionine). Three basic methods for site-directed mutagenesis are often employed. These are cassette mutagenesis (Wells et al., Gene 34:315-23 (1985), the entirety of which is herein incorporated by reference), primer extension (Gilliam et al., Gene 12:129-137 (1980), the entirety of which is herein incorporated by reference); Zoller and Smith, Methods Enzymol. 100:468-500 (1983), the entirety of which is herein incorporated by reference; and Dalbadie-McFarland et al., Proc. Natl. Acad. Sci. (U.S.A.) 79:6409-6413 (1982), the entirety of which is herein incorporated by reference) and methods based upon PCR (Scharf et al., Science 233:1076-1078 (1986), the entirety of which is herein incorporated by reference; Higuchi et al., Nucleic Acids Res. 16:7351-7367 (1988), the entirety of which is herein incorporated by reference). Site-directed mutagenesis approaches are also described in European Patent 0 385 962, the entirety of which is herein incorporated by reference, European Patent 0 359 472, the entirety of which is herein incorporated by reference, and PCT Patent Application WO 93/07278, the entirety of which is herein incorporated by reference.

[0178] Site-directed mutagenesis strategies have been applied to plants for both in vitro as well as in vivo site-directed mutagenesis (Lanz et al., J. Biol. Chem. 266:9971-6 (1991); Kovgan and Zhdanov, Biotekhnologiya 5:148-154; No. 207160n, Chemical Abstracts 110:225 (1989); Ge et al., Proc. Natl. Acad. Sci. (U.S.A.) 86:4037-4041 (1989); Zhu et al., J. Biol. Chem. 271:18494-18498 (1996); Chu et al., Biochemistry 33:6150-6157 (1994); Small et al., EMBO J. 11: 1291-1296 (1992); Cho et al., Mol. Biotechnol. 8:13-16 (1997); Kita et al., J. Biol. Chem. 271:26529-26535 (1996); Jin et al., Mol. Microbiol. 7:555-562 (1993); Hatfield and Vierstra, J. Biol. Chem. 267:14799-14803 (1992); Zhao et al., Biochemistry 31:5093-5099 (1992), all of which are herein incorporated by reference in their entirety).

[0179] Any of the nucleic acid molecules of the present invention may either be modified by site-directed mutagenesis or used as, for example, nucleic acid molecules that are used to target other nucleic acid molecules for modification. It is understood that mutants with more than one altered nucleotide can be constructed using techniques that practitioners skilled in the art are familiar with such as isolating restriction fragments and ligating such fragments into an expression vector (see, for example, Sambrook et al., Molecular Cloning: A Laboratory Manual, Cold Spring Harbor Press (1989)).

[0180] Sequence-specific DNA-binding proteins play a role in the regulation of transcription. The isolation of recombinant cDNAs encoding these proteins facilitates the biochemical analysis of their structural and functional properties. Genes encoding such DNA-binding proteins have been isolated using classical genetics (Vollbrecht et al., Nature 350: 241-243 (1991), the entirety of which is herein incorporated by reference) and molecular biochemical approaches, including the screening of recombinant cDNA libraries with antibodies (Landschulz et al., Genes Dev. 2: 786-800 (1988), the entirety of which is herein incorporated by reference) or DNA probes (Bodner et al., Cell 55: 505-518 (1988), the entirety of which is herein incorporated by reference). In addition, an in situ screening procedure has been used and has facilitated the isolation of sequence-specific DNA-binding proteins from various plant species (Gilmartin et al., Plant Cell 4: 839-849 (1992); Schindler et al., EMBO J. 11: 1261-1273 (1992), both of which are herein incorporated by reference in their entirety). An in situ screening protocol does not require the purification of the protein of interest (Vinson et al., Genes Dev. 2: 801-806 (1988); Singh et al., Cell 52: 415-423 (1988), both of which are herein incorporated by reference in their entirety).

[0181] Steps may be employed to characterize DNA-protein interactions. The first is to identify promoter fragments that interact with DNA-binding proteins, to titrate binding activity, to determine the specificity of binding, and to determine whether a given DNA-binding activity can interact with related DNA sequences (Sambrook et al., Molecular Cloning: A Laboratory Manual, 2^{nd} edition. Cold Spring Harbor Laboratory Press, Cold Spring Harbor, N.Y. (1989). Electrophoretic mobility-shift assay is a widely used assay. The assay provides a simple, rapid, and sensitive method for detecting DNA-binding proteins based on the observation that the mobility of a DNA fragment through a nondenaturing, low-ionic strength polyacrylamide gel is retarded upon association with a DNA-binding protein (Fried and Crother, Nucleic Acids Res. 9: 6505-6525 (1981), the entirety of which is herein incorporated by reference). When one or more specific binding activities have been identified, the exact sequence of the DNA bound by the protein may be determined. Several procedures for characterizing protein/DNA-binding sites are used, including methylation and ethylation interference assays (Maxam and Gilbert, Methods Enzymol. 65: 499-560 (1980); Wissman and Hillen, Methods Enzymol. 208: 365-379 (1991), both of which are herein incorporated by reference in their entirety) and footprinting techniques employing DNase I (Galas and Schmitz, Nucleic Acids Res. 5: 3157-3170 (1978), herein incorporated by reference in its entirety), 1,10-phenanthroline-copper ion methods (Sigman et al., Methods Enzymol. 208: 365-379 (1991), herein incorporated by reference in its entirety) or hydroxyl radical methods (Dixon et al., Methods Enzymol. 208: 380-413 (1991), herein incorporated by reference in its entirety). It is understood that one or more of the nucleic acid molecules of the present invention, preferably one or more of the EST nucleic acid molecules of the present invention may be utilized to identify a protein or fragment thereof that specifically binds to a nucleic acid molecule of the present invention. It is also understood that one or more of the protein molecules or fragments thereof of the present invention may be utilized to identify a nucleic acid molecule that specifically binds to it.

[0182] The two-hybrid system is based on the fact that many cellular functions are carried out by proteins that interact (physically) with one another. Two-hybrid systems have been used to probe the function of new proteins (Chien et al., Proc. Natl. Acad. Sci. (U.S.A.) 88: 9578-9582 (1991); Durfee et al., Genes Dev. 7: 555-569 (1993); Choi et al., Cell 78: 499-512 (1994); Kranz et al., Genes Dev. 8: 313-327 (1994), all of which are herein incorporated by reference in their entirety).

[0183] Interaction mating techniques have facilitated a number of two-hybrid studies of protein-protein interaction. Interaction mating has been used to examine interactions between small sets of tens of proteins (Finley and Brent, Proc. Natl. Acad. Sci. (U.S.A.) 91: 12098-12984 (1994), herein incorporated by reference in its entirety), larger sets of hundreds of proteins, (Bendixen et al., Nucl. Acids Res. 22: 1778-1779 (1994), herein incorporated by reference in its entirety) and to comprehensively map proteins encoded by a small genome (Bartel et al., Nature Genetics 12: 72-77 (1996), herein incorporated by reference in its entirety). This technique utilizes proteins fused to the DNA-binding domain and proteins fused to the activation domain. They are expressed in two different haploid yeast strains of opposite mating type, and the strains are mated to determine if the two proteins interact. Mating occurs when haploid yeast strains come into contact and result in the fusion of the two haploids into a diploid yeast strain. An interaction can be determined by the activation of a two-hybrid reporter gene in the diploid strain. The primary advantage of this technique is that it reduces the number of yeast transformations needed to test individual interactions. It is understood that the protein-protein interactions of protein or fragments thereof of the present invention may be investigated using the two-hybrid system and that any of the nucleic acid molecules of the present invention that encode such proteins or fragments thereof may be used to transform yeast in the two-hybrid system.

[0184] Synechocystis 6803 is a photosynthetic Cyanobacterium capable of oxygenic photosynthesis as well as heterotrophic growth in the absence of light. The entire genome has been sequenced, and it is reported to have a circular genome size of 3.57 Mbp containing 3168 potential open reading frames. Open reading frames (ORFs) were identified based upon their homology to other reported ORFs and by using ORF identification computer programs. Sixteen hundred potential ORFs were assigned based on their homology to previously identified ORFs. Of these 1600 ORFs, 145 were identical to reported ORFs (Kaneko et al., DNA Research 3:109-36 (1996), herein incorporated by reference in its entirety).

[0185] Several prokaryote promoters have been used in Synechocystis to express heterologous genes including the tac, lac, and lambda phage promoters (Bryant (ed.), The Molecular Biology of Cyanobacteria, Kluwer Academic Publishers, (1994); Ferino and Chauvat, Gene 84:257-266 (1989), both of which are herein incorporated by reference in their entirety). Several bacterial origins of replication such as RSF1010 and ACYC are reported to replicate in Synechocystis (Mermet-Bouvier and Chauvat, Current Microbiology 28:145-148 (1994); Kuhlemeier et al., Mol. Gen. Genet. 184:249-254 (1981), both of which are herein incorporated by reference in their entirety).

[0186] Synechocystis has been used to study gene regulation by gene replacement through homologous recombination or by gene disruption using antibiotic resistance markers (Pakrasi et al., EMBO 7:325-332 (1988), herein incorporated by reference in its entirety). In such gene regulation studies, double reciprocal homologous regions of the host genome flanking the gene of interest recombine to stably integrate the gene of interest into the genome. The gene of interest can be expressed once that gene has been stably integrated into the genome. Biochemical analysis can be performed to study the effect of the replaced or deleted gene.

[0187] It is understood that the agents of the present invention may be employed in a Synechocystis system.

[0188] Exogenous genetic material may be transferred into a plant cell and the plant cell regenerated into a whole, fertile or sterile plant. Exogenous genetic material is any genetic material, whether naturally occurring or otherwise, from any source that is capable of being inserted into any organism. Such genetic material may be transferred into either monocotyledons and dicotyledons including but not limited to the crops, maize and soybean (See specifically, Chistou, Particle Bombardment for Genetic Engineering of Plants, pp 63-69 (maize), pp 50-60 (soybean), Biotechnology Intelligence Unit. Academic Press, San Diego, Calif. (1996), the entirety of which is herein incorporated by reference and generally Chistou, Particle Bombardment for Genetic Engineering of Plants, Biotechnology Intelligence Unit. Academic Press, San Diego, Calif. (1996), the entirety of which is herein incorporated by reference).

[0189] Transfer of a nucleic acid that encodes for a protein can result in overexpression of that protein in a transformed cell or transgenic plant. One or more of the proteins or fragments thereof encoded by nucleic acid molecules of the present invention may be overexpressed in a transformed cell or transformed plant. Such overexpression may be the result of transient or stable transfer of the exogenous material.

[0190] Exogenous genetic material may be transferred into a plant cell by the use of a DNA vector or construct designed for such a purpose. Design of such a vector is generally within the skill of the art (See, Plant Molecular Biology: A Laboratory Manual eds. Clark, Springer, New York (1997), herein incorporated by reference in its entirety).

[0191] A construct or vector may include a plant promoter to express the protein or protein fragment of choice. A number of promoters which are active in plant cells have been described in the literature. These include the nopaline synthase (NOS) promoter (Ebert et al., Proc. Natl. Acad. Sci. (USA) 84:5745-5749 (1987), herein incorporated by reference in its entirety), the octopine synthase (OCS) promoter (which are carried on tumor-inducing plasmids of Agrobacterium tumefaciens), the caulimovirus promoters such as the cauliflower mosaic virus (CaMV) 19S promoter (Lawton et al., Plant Mol. Biol. 9:315-324 (1987), herein incorporated by reference in its entirety) and the CAMV 35S promoter (Odell et al., Nature 313:810-812 (1985), herein incorporated by reference in its entirety), the figwort mosaic virus 35S-promoter, the light-inducible promoter from the small subunit of ribulose-1,5-bis-phosphate carboxylase (ssRUBISCO), the Adh promoter (Walker et al., Proc. Natl. Acad. Sci. (U.S.A.) 84:6624-6628 (1987), herein incorporated by reference in its entirety), the sucrose synthase promoter (Yang et al., Proc. Natl. Acad. Sci. (USA) 87:4144-4148 (1990), herein incorporated by reference in its entirety), the R gene complex promoter (Chandler et al., The Plant Cell 1:1175-1183 (1989), herein incorporated by reference in its entirety), and the chlorophyll a/b binding protein gene promoter, etc. These promoters have been used to create DNA constructs which have been expressed in plants; see, e.g., PCT publication WO 84/02913, herein incorporated by reference in its entirety.

[0192] Promoters which are known or are found to cause transcription of DNA in plant cells can be used in the present invention. Such promoters may be obtained from a variety of sources such as plants and plant viruses. It is preferred that the particular promoter selected should be capable of causing sufficient expression to result in the production of an effective amount of a protein to cause the desired phenotype. In addition to promoters which are known to cause transcription of DNA in plant cells, other promoters may be identified for use in the current invention by screening a plant cDNA library for genes which are selectively or preferably expressed in the target tissues or cells.

[0193] For the purpose of expression in source tissues of the plant, such as the leaf, seed, root or stem, it is preferred that the promoters utilized in the present invention have relatively high expression in these specific tissues. For this purpose, one may choose from a number of promoters for genes with tissue- or cell-specific or -enhanced expression. Examples of such promoters reported in the literature include the chloroplast glutamine synthetase GS2 promoter from pea (Edwards et al., Proc. Natl. Acad. Sci. (U.S.A.) 87:3459-3463 (1990), herein incorporated by reference in its entirety), the chloroplast fructose-1,6-biphosphatase (FBPase) promoter from wheat (Lloyd et al., Mol. Gen. Genet. 225:209-216 (1991), herein incorporated by reference in its entirety), the nuclear photosynthetic ST-LS1 promoter from potato (Stockhaus et al., EMBO J. 8:2445-2451 (1989), herein incorporated by reference in its entirety), the phenylalanine ammonia-lyase (PAL) promoter and the chalcone synthase (CHS) promoter from Arabidopsis thaliana. Also reported to be active in photosynthetically active tissues are the ribulose-1,5-bisphosphate carboxylase (RbcS) promoter from eastern larch (Larix laricina), the promoter for the cab gene, cab6, from pine (Yamamoto et al., Plant Cell Physiol. 35:773-778 (1994), herein incorporated by reference in its entirety), the promoter for the Cab-1 gene from wheat (Fejes et al., Plant Mol. Biol. 15:921-932 (1990), herein incorporated by reference in its entirety), the promoter for the CAB-1 gene from spinach (Lubberstedt et al., Plant Physiol. 104:997-1006 (1994), herein incorporated by reference in its entirety), the promoter for the cab1R gene from rice (Luan et al., Plant Cell. 4:971-981 (1992), herein incorporated by reference in its entirety), the pyruvate, orthophosphate dikinase (PPDK) promoter from maize (Matsuoka et al., Proc. Natl. Acad. Sci. (U.S.A.) 90: 9586-9590 (1993), herein incorporated by reference in its entirety), the promoter for the tobacco Lhcb1*2 gene (Cerdan et al., Plant Mol. Biol. 33: 245-255. (1997), herein incorporated by reference in its entirety), the Arabidopsis thaliana SUC2 sucrose-H+ symporter promoter (Truernit et al., Planta. 196: 564-570 (1995), herein incorporated by reference in its entirety), and the promoter for the thylacoid membrane proteins from spinach (psaD, psaF, psae, PC, FNR, atpC, atpD, cab, rbcS). Other promoters for the chlorophyl a/b-binding proteins may also be utilized in the present invention, such as the promoters for LhcB gene and PsbP gene from white mustard (Sinapis alba; Kretsch et al., Plant Mol. Biol. 28: 219-229 (1995), herein incorporated by reference in its entirety).

[0194] For the purpose of expression in sink tissues of the plant, such as the tuber of the potato plant, the fruit of tomato, or the seed of maize, wheat, rice, and barley, it is preferred that the promoters utilized in the present invention have relatively high expression in these specific tissues. A number of promoters for genes with tuber-specific or -enhanced expression are known, including the class I patatin promoter (Bevan et al., EMBO J. 8: 1899-1906 (1986); Jefferson et al., Plant Mol. Biol. 14: 995-1006 (1990), both of which are herein incorporated by reference in their entirety), the promoter for the potato tuber ADPGPP genes, both the large and small subunits, the sucrose synthase promoter (Salanoubat and Belliard, Gene. 60: 47-56 (1987), Salanoubat and Belliard, Gene. 84: 181-185 (1989), both of which are incorporated by reference in their entirety), the promoter for the major tuber proteins including the 22 kd protein complexes and proteinase inhibitors (Hannapel, Plant Physiol. 101: 703-704 (1993), herein incorporated by reference in its entirety), the promoter for the granule bound starch synthase gene (GBSS) (Visser et al., Plant Mol. Biol. 17: 691-699 (1991), herein incorporated by reference in its entirety), and other class I and II patatins promoters (Koster-Topfer et al., Mol Gen Genet. 219: 390-396 (1989); Mignery et al., Gene. 62: 27-44 (1988), both of which are herein incorporated by reference in their entirety).

[0195] Other promoters can also be used to express a fructose 1,6 bisphosphate aldolase gene in specific tissues, such as seeds or fruits. The promoter for β-conglycinin (Chen et al., Dev. Genet. 10: 112-122 (1989), herein incorporated by reference in its entirety) or other seed-specific promoters such as the napin and phaseolin promoters, can be used. The zeins are a group of storage proteins found in maize endosperm. Genomic clones for zein genes have been isolated (Pedersen et al., Cell 29: 1015-1026 (1982), herein incorporated by reference in its entirety), and the promoters from these clones, including the 15 kD, 16 kD, 19 kD, 22 kD, 27 kD, and gamma genes, could also be used. Other promoters known to function, for example, in maize, include the promoters for the following genes: waxy, Brittle, Shrunken 2, Branching enzymes I and II, starch synthases, debranching enzymes, oleosins, glutelins, and sucrose synthases. A particularly preferred promoter for maize endosperm expression is the promoter for the glutelin gene from rice, more particularly the Osgt-1 promoter (Zheng et al., Mol. Cell. Biol. 13: 5829-5842 (1993), herein incorporated by reference in its entirety). Examples of promoters suitable for expression in wheat include those promoters for the ADPglucose pyrophosphorylase (ADPGPP) subunits, the granule bound and other starch synthases, the branching and debranching enzymes, the embryogenesis-abundant proteins, the gliadins, and the glutenins. Examples of such promoters in rice include those promoters for the ADPGPP subunits, the granule bound and other starch synthases, the branching enzymes, the debranching enzymes, sucrose synthases, and the glutelins. A particularly preferred promoter is the promoter for rice glutelin, Osgt-1. Examples of such promoters for barley include those for the ADPGPP subunits, the granule bound and other starch synthases, the branching enzymes, the debranching enzymes, sucrose synthases, the hordeins, the embryo globulins, and the aleurone specific proteins.

[0196] Root specific promoters may also be used. An example of such a promoter is the promoter for the acid chitinase gene (Samac et al., Plant Mol. Biol. 25: 587-596 (1994), herein incorporated by reference in its entirety). Expression in root tissue could also be accomplished by utilizing the root specific subdomains of the CaMV35S promoter that have been identified (Lam et al., Proc. Natl. Acad. Sci. (U.S.A.) 86:7890-7894 (1989), herein incorporated by reference in its entirety). Other root cell specific promoters include those reported by Conkling et al. (Conkling et al., Plant Physiol. 93:1203-1211 (1990), herein incorporated by reference in its entirety).

[0197] Additional promoters that may be utilized are described, for example, in U.S. Pat. Nos. 5,378,619, 5,391,725, 5,428,147, 5,447,858, 5,608,144, 5,608,144, 5,614,399, 5,633,441, 5,633,435, and 4,633,436, all of which are herein incorporated in their entirety. In addition, a tissue specific enhancer may be used (Fromm et al., The Plant Cell 1:977-984 (1989), herein incorporated by reference in its entirety).

[0198] Constructs or vectors may also include, with the coding region of interest, a nucleic acid sequence that acts, in whole or in part, to terminate transcription of that region. For example, such sequences have been isolated including the Tr7 3′ sequence and the nos 3′ sequence (Ingelbrecht et al., The Plant Cell 1:671-680 (1989); Bevan et al., Nucleic Acids Res. 11:369-385 (1983), all of which are herein incorporated by reference in their entirety), or the like.

[0199] A vector or construct may also include regulatory elements. Examples of such include the Adh intron 1 (Callis et al., Genes and Develop. 1:1183-1200 (1987), herein incorporated by reference in its entirety), the sucrose synthase intron (Vasil et al., Plant Physiol. 91:1575-1579 (1989), herein incorporated by reference in its entirety) and the TMV omega element (Gallie et al., The Plant Cell 1:301-311 (1989), herein incorporated by reference in its entirety). These and other regulatory elements may be included when appropriate.

[0200] A vector or construct may also include a selectable marker. Selectable markers may also be used to select for plants or plant cells that contain the exogenous genetic material. Examples of such include, but are not limited to, a neo gene (Potrykus et al., Mol. Gen. Genet. 199:183-188 (1985), herein incorporated by reference in its entirety) which codes for kanamycin resistance and can be selected for using kanamycin, G418, etc.; a bar gene which codes for bialaphos resistance; a mutant EPSP synthase gene (Hinchee et al., Bio/Technology 6:915-922 (1988), herein incorporated by reference in its entirety) which encodes glyphosate resistance; a nitrilase gene which confers resistance to bromoxynil (Stalker et al., J. Biol. Chem. 263:6310-6314 (1988), herein incorporated by reference in its entirety); a mutant acetolactate synthase gene (ALS) which confers imidazolinone or sulphonylurea resistance (European Patent Application 154,204 (Sep. 11, 1985), herein incorporated by reference in its entirety); and a methotrexate resistant DHFR gene (Thillet et al., J. Biol. Chem. 263:12500-12508 (1988), herein incorporated by reference in its entirety).

[0201] A vector or construct may also include a transit peptide. Incorporation of a suitable chloroplast transit peptide may also be employed (European Patent Application Publication Number 0218571, herein incorporated by reference in its entirety). Translational enhancers may also be incorporated as part of the vector DNA. DNA constructs could contain one or more 5′ non-translated leader sequences which may serve to enhance expression of the gene products from the resulting mRNA transcripts. Such sequences may be derived from the promoter selected to express the gene or can be specifically modified to increase translation of the mRNA. Such regions may also be obtained from viral RNAs, from suitable eukaryotic genes, or from a synthetic gene sequence. For a review of optimizing expression of transgenes, see Koziel et al., Plant Mol. Biol. 32:393-405 (1996), herein incorporated by reference in its entirety.

[0202] A vector or construct may also include a screenable marker. Screenable markers may be used to monitor expression. Exemplary screenable markers include a β-glucuronidase or uidA gene (GUS) which encodes an enzyme for which various chromogenic substrates are known (Jefferson, Plant Mol. Biol, Rep. 5: 387-405 (1987); Jefferson et al., EMBO J. 6: 3901-3907 (1987), both of which are herein incorporated by reference in their entirety); an R-locus gene, which encodes a product that regulates the production of anthocyanin pigments (red color) in plant tissues ((Dellaporta et al., Stadler Symposium 11:263-282 (1988), herein incorporated by reference in its entirety); a β-lactamase gene (Sutcliffe et al., Proc. Natl. Acad. Sci. (U.S.A.) 75: 3737-3741 (1978), herein incorporated by reference in its entirety), a gene which encodes an enzyme for which various chromogenic substrates are known (e.g., PADAC, a chromogenic cephalosporin); a luciferase gene (Ow et al., Science 234: 856-859 (1986), herein incorporated by reference in its entirety) a xylE gene (Zukowsky et al., Proc. Natl. Acad. Sci. (U.S.A) 80:1101-1105 (1983), herein incorporated by reference in its entirety) which encodes a catechol diozygenase that can convert chromogenic catechols; an α-amylase gene (Ikatu et al., Bio/Technol. 8:241-242 (1990), herein incorporated by reference in its entirety); a tyrosinase gene (Katz et al., J. Gen. Microbiol. 129:2703-2714 (1983), herein incorporated by reference in its entirety) which encodes an enzyme capable of oxidizing tyrosine to DOPA and dopaquinone which in turn condenses to melanin; an α-galactosidase, which will turn a chromogenic α-galactose substrate.

[0203] Included within the terms “selectable or screenable marker genes” are also genes which encode a scriptable marker whose secretion can be detected as a means of identifying or selecting for transformed cells. Examples include markers which encode a secretable antigen that can be identified by antibody interaction, or even secretable enzymes which can be detected catalytically. Secretable proteins fall into a number of classes, including small, diffusible proteins detectable, e.g., by ELISA, small active enzymes detectable in extracellular solution (e.g., α-amylase, β-lactamase, phosphinothricin transferase), or proteins which are inserted or trapped in the cell wall (such as proteins which include a leader sequence such as that found in the expression unit of extension or tobacco PR-S). Other possible selectable and/or screenable marker genes will be apparent to those of skill in the art.

[0204] Methods and compositions for transforming a bacteria and other microorganisms are known in the art (see for example Sambrook et al., Molecular Cloning: A Laboratory Manual, Second Edition, Cold Spring Harbor Laboratory Press, Cold Spring Harbor, N.Y., (1989), the entirety of which is herein incorporated by reference).

[0205] There are many methods for introducing transforming nucleic acid molecules into plant cells. Suitable methods are believed to include virtually any method by which nucleic acid molecules may be introduced into a cell, such as by Agrobacterium infection or direct delivery of nucleic acid molecules such as, for example, by PEG-mediated transformation, by electroporation or by acceleration of DNA coated particles, etc. (Pottykus, Ann. Rev. Plant Physiol. Plant Mol. Biol. 42:205-225 (1991); Vasil, Plant Mol. Biol. 25: 925-937 (1994), both of which are herein incorporated by reference in their entirety). For example, electroporation has been used to transform maize protoplasts (Fromm et al., Nature 312:791-793 (1986), herein incorporated by reference in its entirety).

[0206] Other vector systems suitable for introducing transforming DNA into a host plant cell includes but is not limited to binary artificial chromosome (BIBAC) vectors (Hamilton et al., Gene 200:107-116, (1997), herein incorporated by reference in its entirety, and transfection with RNA viral vectors (Della-Cioppa et al., Ann. N.Y. Acad. Sci. (1996), 792 (Engineering Plants for Commercial Products and Applications), 57-61, the entirety of which is herein incorporated by reference.

[0207] Technology for introduction of DNA into cells is well known to those of skill in the art. Four general methods for delivering a gene into cells have been described: (1) chemical methods (Graham and van der Eb, Virology, 54:536-539 (1973), the entirety of which is herein incorporated by reference); (2) physical methods such as microinjection (Capecchi, Cell 22:479-488 (1980), electroporation (Wong and Neumann, Biochem. Biophys. Res. Commun., 107:584-587 (1982); Fromm et al., Proc. Natl. Acad. Sci. USA, 82:5824-5828 (1985); U.S. Pat. No. 5,384,253; and the gene gun (Johnston and Tang, Methods Cell Biol. 43:353-365 (1994), all of which the entirety is herein incorporated by reference; (3) viral vectors (Clapp, Clin. Perinatol., 20:155-168 (1993); Lu et al., J. Exp. Med., 178:2089-2096 (1993); Eglitis and Anderson, Biotechniques, 6:608-614 (1988), all of which the entirety is herein incorporated by reference); and (4) receptor-mediated mechanisms (Curiel et al., Hum. Gen. Ther., 3:147-154 (1992); Wagner et al., Proc. Natl. Acad. Sci. USA, 89:6099-6103 (1992), all of which the entirety is herein incorporated by reference).

[0208] Acceleration methods that may be used include, for example, microprojectile bombardment and the like. One example of a method for delivering transforming nucleic acid molecules to plant cells is microprojectile bombardment. This method has been reviewed by Yang and Christou, eds., Particle Bombardment Technology for Gene Transfer, Oxford Press, Oxford, England (1994), the entirety of which is herein incorporated by reference). Non-biological particles (microprojectiles) that may be coated with nucleic acids and delivered into cells by a propelling force. Exemplary particles include those comprised of tungsten, gold, platinum, and the like.

[0209] A particular advantage of microprojectile bombardment, in addition to it being an effective means of reproducibly, and stably transforming monocotyledons, is that neither the isolation of protoplasts (Cristou et al., Plant Physiol. 87:671-674 (1988), herein incorporated by reference in its entirety) nor the susceptibility of Agrobacterium infection is required. An illustrative embodiment of a method for delivering DNA into maize cells by acceleration is a biolistics g-particle delivery system, which can be used to propel particles coated with DNA through a screen, such as a stainless steel or Nytex screen, onto a filter surface covered with corn cells cultured in suspension. Gordon-Kamm et al., describes the basic procedure for coating tungsten particles with DNA (Gordon-Kamm et al., Plant Cell 2: 603-618 (1990), herein incorporated by reference in its entirety). The screen disperses the tungsten nucleic acid particles so that they are not delivered to the recipient cells in large aggregates. A particle delivery system suitable for use with the present invention is the helium acceleration PDS-1000/He gun which is available from Bio-Rad Laboratories (Bio-Rad, Hercules, Calif.)(Sanford et al., Technique 3:3-16 (1991), herein incorporated by reference in its entirety).

[0210] For the bombardment, cells in suspension may be concentrated on filters. Filters containing the cells to be bombarded are positioned at an appropriate distance below the microprojectile stopping plate. If desired, one or more screens are also positioned between the gun and the cells to be bombarded.

[0211] Alternatively, immature embryos or other target cells may be arranged on solid culture medium. The cells to be bombarded are positioned at an appropriate distance below the macroprojectile stopping plate. If desired, one or more screens are also positioned between the acceleration device and the cells to be bombarded. Through the use of techniques set forth herein one may obtain up to 1000 or more foci of cells transiently expressing a marker gene. The number of cells in a focus which express the exogenous gene product 48 hours post-bombardment often range from one to ten and average one to three.

[0212] In bombardment transformation, one may optimize the prebombardment culturing conditions and the bombardment parameters to yield the maximum numbers of stable transformants. Both the physical and biological parameters for bombardment are important in this technology. Physical factors are those that involve manipulating the DNA/microprojectile precipitate or those that affect the flight and velocity of either the macro- or microprojectiles. Biological factors include all steps involved in manipulation of cells before and immediately after bombardment, the osmotic adjustment of target cells to help alleviate the trauma associated with bombardment, and also the nature of the transforming DNA, such as linearized DNA or intact supercoiled plasmids. It is believed that pre-bombardment manipulations are especially important for successful transformation of immature embryos. In another alternative embodiment, plastids can be stably transformed. Methods disclosed for plastid transformation in higher plants include the particle gun delivery of DNA containing a selectable marker and targeting of the DNA to the plastid genome through homologous recombination (Svab et al., Proc. Natl. Acad. Sci. (U.S.A.) 87:8526-8530 (1990); Svab and Maliga, Proc. Natl. Acad. Sci. (U.S.A.) 90:913-917 (1993); Staub and Maliga, EMBO J. 12:601-606 (1993); U.S. Pat. Nos. 5,451,513 and 5,545,818, all of which are herein incorporated by reference in their entirety).

[0213] Accordingly, it is contemplated that one may wish to adjust various aspects of the bombardment parameters in small scale studies to fully optimize the conditions. One may particularly wish to adjust physical parameters such as gap distance, flight distance, tissue distance, and helium pressure. One may also minimize the trauma reduction factors by modifying conditions which influence the physiological state of the recipient cells and which may therefore influence transformation and integration efficiencies. For example, the osmotic state, tissue hydration and the subculture stage or cell cycle of the recipient cells may be adjusted for optimum transformation. The execution of other routine adjustments will be known to those of skill in the art in light of the present disclosure.

[0214] Agrobacterium-mediated transfer is a widely applicable system for introducing genes into plant cells because the DNA can be introduced into whole plant tissues, thereby bypassing the need for regeneration of an intact plant from a protoplast. The use of Agrobacterium-mediated plant integrating vectors to introduce DNA into plant cells is well known in the art. See, for example the methods described (Fraley et al., Biotechnology 3:629-635 (1985); Rogers et al., Meth. In Enzymol, 153:253-277 (1987), both of which are herein incorporated by reference in their entirety. Further, the integration of the Ti-DNA is a relatively precise process resulting in few rearrangements. The region of DNA to be transferred is defined by the border sequences, and intervening DNA is usually inserted into the plant genome as described (Spielmann et al., Mol. Gen. Genet., 205:34 (1986), the entirety of which is herein incorporated by reference).

[0215] Modern Agrobacterium transformation vectors are capable of replication in E. coli as well as Agrobacterium, allowing for convenient manipulations as described (Klee et al., In: Plant DNA Infectious Agents, T. Hohn and J. Schell, eds., Springer-Verlag, New York, pp. 179-203 (1985), the entirety of which is herein incorporated by reference. Moreover, recent technological advances in vectors for Agrobacterium-mediated gene transfer have improved the arrangement of genes and restriction sites in the vectors to facilitate construction of vectors capable of expressing various polypeptide coding genes. The vectors described have convenient multi-linker regions flanked by a promoter and a polyadenylation site for direct expression of inserted polypeptide coding genes and are suitable for present purposes (Rogers et al., Meth. In Enzymol., 153:253-277 (1987), the entirety of which is herein incorporated by reference). In addition, Agrobacterium containing both armed and disarmed Ti genes can be used for the transformations. In those plant strains where Agrobacterium-mediated transformation is efficient, it is the method of choice because of the facile and defined nature of the gene transfer.

[0216] A transgenic plant formed using Agrobacterium transformation methods typically contains a single gene on one chromosome. Such transgenic plants can be referred to as being heterozygous for the added gene. More preferred is a transgenic plant that is homozygous for the added structural gene; i.e., a transgenic plant that contains two added genes, one gene at the same locus on each chromosome of a chromosome pair. A homozygous transgenic plant can be obtained by sexually mating (selfing) an independent segregant transgenic plant that contains a single added gene, germinating some of the seed produced and analyzing the resulting plants produced for the gene of interest.

[0217] It is also to be understood that two different transgenic plants can also be mated to produce offspring that contain two independently segregating added, exogenous genes. Selfing of appropriate progeny can produce plants that are homozygous for both added, exogenous genes that encode a polypeptide of interest. Back-crossing to a parental plant and out-crossing with a non-transgenic plant are also contemplated, as is vegetative propagation.

[0218] Transformation of plant protoplasts can be achieved using methods based on calcium phosphate precipitation, polyethylene glycol treatment, electroporation, and combinations of these treatments. See for example (Potrykus et al., Mol. Gen. Genet., 205:193-200 (1986); Lorz et al., Mol. Gen. Genet., 199:178, (1985); Fromm et al., Nature, 319:791, (1986); Uchimiya et al., Mol. Gen. Genet.:204:204, (1986); Callis et al., Genes and Development, 1183, (1987); Marcotte et al., Nature, 335:454, (1988), all of which are herein incorporated by reference in their entirety).

[0219] Application of these systems to different plant strains depends upon the ability to regenerate that particular plant strain from protoplasts. Illustrative methods for the regeneration of cereals from protoplasts are described (Fujimura et al., Plant Tissue Culture Letters, 2:74, (1985); Toriyama et al., Theor Appl. Genet. 205:34. (1986); Yamada et al., Plant Cell Rep., 4:85, (1986); Abdullah et al., Biotechnology, 4:1087, (1986), all of which are herein incorporated by reference in their entirety).

[0220] To transform plant strains that cannot be successfully regenerated from protoplasts, other ways to introduce DNA into intact cells or tissues can be utilized. For example, regeneration of cereals from immature embryos or explants can be effected as described (Vasil, Biotechnology, 6:397, (1988), herein incorporated by reference in its entirety). In addition, “particle gun” or high-velocity microprojectile technology can be utilized (Vasil et al., Bio/Technology 10:667, (1992), herein incorporated by reference in its entirety).

[0221] Using the latter technology, DNA is carried through the cell wall and into the cytoplasm on the surface of small metal particles as described (Klein et al., Nature, 328:70, (1987); Klein et al., Proc. Natl. Acad. Sci. USA, 85:8502-8505, (1988); McCabe et al., Biotechnology, 6:923, (1988), all of which are herein incorporated by reference in their entirety). The metal particles penetrate through several layers of cells and thus allow the transformation of cells within tissue explants.

[0222] Other methods of cell transformation can also be used and include but are not limited to introduction of DNA into plants by direct DNA transfer into pollen (Hess et al., Intern Rev. Cytol., 107:367, (1987); Luo et al., Plant Mol. Biol. Reporter, 6:165, (1988), all of which are herein incorporated by reference in their entirety), by direct injection of DNA into reproductive organs of a plant (Pena et al., Nature, 325:274, (1987), herein incorporated by reference in its entirety), or by direct injection of DNA into the cells of immature embryos followed by the rehydration of desiccated embryos (Neuhaus et al., Theor. Appl. Genet., 75:30, (1987), herein incorporated by reference in its entirety).

[0223] The regeneration, development, and cultivation of plants from single plant protoplast transformants or from various transformed explants is well known in the art (Weissbach and Weissbach, In: Methods for Plant Molecular Biology, (Eds.), Academic Press, Inc. San Diego, Calif., (1988), herein incorporated by reference in its entirety). This regeneration and growth process typically includes the steps of selection of transformed cells, culturing those individualized cells through the usual stages of embryonic development through the rooted plantlet stage. Transgenic embryos and seeds are similarly regenerated. The resulting transgenic rooted shoots are thereafter planted in an appropriate plant growth medium such as soil.

[0224] The development or regeneration of plants containing the foreign, exogenous gene that encodes a protein of interest is well known in the art. Preferably, the regenerated plants are self-pollinated to provide homozygous transgenic plants, as discussed before. Otherwise, pollen obtained from the regenerated plants is crossed to seed-grown plants of agronomically important lines. Conversely, pollen from plants of these important lines is used to pollinate regenerated plants. A transgenic plant of the present invention containing a desired polypeptide is cultivated using methods well known to one skilled in the art.

[0225] There are a variety of methods for the regeneration of plants from plant tissue. The particular method of regeneration will depend on the starting plant tissue and the particular plant species to be regenerated.

[0226] Methods for transforming dicots, primarily by use of Agrobacterium tumefaciens, and obtaining transgenic plants have been published for cotton (U.S. Pat. No. 5,004,863, U.S. Pat. No. 5,159,135, U.S. Pat. No. 5,518,908, all of which herein incorporated by reference in their entirety); soybean (U.S. Pat. No. 5,569,834, U.S. Pat. No. 5,416,011, McCabe et al., Biotechnology 6:923, (1988), Christou et al., Plant Physiol., 87:671-674 (1988), all of which are herein incorporated by reference in their entirety); Brassica (U.S. Pat. No. 5,463,174, herein incorporated by reference in its entirety); peanut (Cheng et al., Plant Cell Rep. 15: 653-657 (1996); McKently et al., Plant Cell Rep. 14:699-703 (1995), all of which are herein incorporated by reference in their entirety); papaya (Yang et al., (1996), herein incorporated by reference in its entirety); pea (Grant et al., Plant Cell Rep. 15:254-258, (1995), herein incorporated by reference in its entirety).

[0227] Transformation of monocotyledons using electroporation, particle bombardment, and Agrobacterium have also been reported. Transformation and plant regeneration have been achieved in asparagus (Bytebier et al., Proc. Natl. Acad. Sci. USA 84:5345, (1987), herein incorporated by reference in its entirety); barley (Wan and Lemaux, Plant Physiol 104:37, (1994), herein incorporated by reference in its entirety); maize (Rhodes et al., Science 240: 204, (1988), Gordon-Kamm et al., Plant Cell, 2:603, (1990), Fromm et al., Bio/Technology 8:833, (1990), Koziel et al., Bio/Technology 11:194, (1993), Armstrong et al., Crop Science 35:550-557, (1995), all of which are herein incorporated by reference in their entirety); oat (Somers et al., Bio/Technology, 10:1589, (1992), herein incorporated by reference in its entirety); orchardgrass (Horn et al., Plant Cell Rep. 7:469, (1988), herein incorporated by reference in its entirety); rice (Toriyama et al., Theor Appl. Genet. 205:34, (1986); Park et al., Plant Mol. Biol., 32: 1135-1148, (1996); Abedinia et al., Aust. J. Plant Physiol. 24:133-141, (1997); Zhang and Wu, Theor. Appl. Genet. 76:835, (1988); Zhang et al. Plant Cell Rep. 7:379, (1988); Battraw and Hall, Plant Sci. 86:191-202, (1992); Christou et al., Bio/Technology 9:957, (1991), all of which are herein incorporated by reference in their entirety); sugarcane (Bower and Birch, Plant J. 2:409, (1992), herein incorporated by reference in its entirety); tall fescue (Wang et al., Bio/Technology 10:691, (1992), herein incorporated by reference in its entirety), and wheat (Vasil et al., Bio/Technology 10:667, (1992); U.S. Pat. No. 5,631,152, both of which are herein incorporated by reference in their entirety).

[0228] Assays for gene expression based on the transient expression of cloned nucleic acid constructs have been developed by introducing the nucleic acid molecules into plant cells by polyethylene glycol treatment, electroporation, or particle bombardment (Marcotte, et al., Nature, 335: 454-457 (1988); Marcotte, et al., Plant Cell, 1: 523-532 (1989); McCarty, et al., Cell 66: 895-905 (1991); Hattori, et al., Genes Dev. 6: 609-618 (1992); Goff, et al., EMBO J. 9: 2517-2522 (1990), all of which are herein incorporated by reference in their entirety). Transient expression systems may be used to functionally dissect gene constructs (See generally, Mailga et al., Methods in Plant Molecular Biology, Cold Spring Harbor Press (1995)).

[0229] Any of the nucleic acid molecules of the present invention may be introduced into a plant cell in a permanent or transient manner in combination with other genetic elements such as vectors, promoters enhancers etc. Further any of the nucleic acid molecules of the present invention may be introduced into a plant cell in a manner that allows for over expression of the protein or fragment thereof encoded by the nucleic acid molecule.

[0230] Cosuppression is the reduction in expression levels, usually at the level of RNA, of a particular endogenous gene or gene family by the expression of a homologous sense construct that is capable of transcribing mRNA of the same strandedness as the transcript of the endogenous gene (Napoli et al., Plant Cell 2: 279-289 (1990); van der Krol et al., Plant Cell 2: 291-299 (1990), both of which are herein incorporated by reference in their entirety). Cosuppression may result from stable transformation with a single copy nucleic acid molecule that is homologous to a nucleic acid sequence found with the cell (Prolls and Meyer, Plant J. 2:465-475 (1992), herein incorporated by reference in its entirety) or with multiple copies of a nucleic acid molecule that is homologous to a nucleic acid sequence found with the cell (Mittlesten et al., Mol. Gen. Genet. 244: 325-330 (1994), herein incorporated by reference in its entirety). Genes, even though different, linked to homologous promoters may result in the cosuppression of the linked genes (Vaucheret, C. R. Acad. Sci. III 316: 1471-1483 (1993), herein incorporated by reference in its entirety).

[0231] This technique has, for example been applied to generate white flowers from red petunia and tomatoes that do not ripen on the vine. Up to 50% of petunia transformants that contained a sense copy of the chalcone synthase (CHS) gene produced white flowers or floral sectors; this was as a result of the post-transcriptional loss of mRNA encoding CHS (Flavell, Proc. Natl. Acad. Sci. (U.S.A.) 91:3490-3496 (1994)), herein incorporated by reference in its entirety). Cosuppression may require the coordinate transcription of the transgene and the endogenous gene, and can be reset by a developmental control mechanism (Jorgensen, Trends Biotechnol, 8:340344 (1990); Meins and Kunz, In: Gene Inactivation and Homologous Recombination in Plants (Paszkowski, J., ed.), pp. 335-348. Kluwer Academic, Netherlands (1994), both of which are herein incorporated by reference in their entirety).

[0232] It is understood that one or more of the nucleic acids of the present invention including those comprising SEQ ID NO: 1 through SEQ ID NO:6041 or complement thereof or fragments of either or other nucleic acid molecules of the present invention may be introduced into a plant cell and transcribed using an appropriate promoter with such transcription resulting in the co-suppression of an endogenous protein.

[0233] Antisense approaches are a way of preventing or reducing gene function by targeting the genetic material (Mol et al., FEBS Lett. 268: 427-430 (1990), herein incorporated by reference in its entirety). The objective of the antisense approach is to use a sequence complementary to the target gene to block its expression and create a mutant cell line or organism in which the level of a single chosen protein is selectively reduced or abolished. Antisense techniques have several advantages over other ‘reverse genetic’ approaches. The site of inactivation and its developmental effect can be manipulated by the choice of promoter for antisense genes or by the timing of external application or microinjection. Antisense can manipulate its specificity by selecting either unique regions of the target gene or regions where it shares homology to other related genes (Hiatt et al., In Genetic Engineering, Setlow (ed.), Vol. 11, New York: Plenum 49-63 (1989), the entirety of which is herein incorporated by reference).

[0234] The principle of regulation by antisense RNA is that RNA that is complementary to the target mRNA is introduced into cells, resulting in specific RNA:RNA duplexes being formed by base pairing between the antisense substrate and the target mRNA (Green et al., Annu. Rev. Biochem. 55: 569-597 (1986), herein incorporated by reference in its entirety). Under one embodiment, the process involves the introduction and expression of an antisense gene sequence. Such a sequence is one in which part or all of the normal gene sequences are placed under a promoter in inverted orientation so that the ‘wrong’ or complementary strand is transcribed into a noncoding antisense RNA that hybridizes with the target mRNA and interferes with its expression (Takayama and Inouye, Crit. Rev. Biochem. Mol. Biol. 25: 155-184 (1990), herein incorporated by reference in its entirety). An antisense vector is constructed by standard procedures and introduced into cells by transformation, transfection, electroporation, microinjection, or by infection, etc. The type of transformation and choice of vector will determine whether expression is transient or stable. The promoter used for the antisense gene may influence the level, timing, tissue, specificity, or inducibility of the antisense inhibition.

[0235] It is understood that protein synthesis activity in a plant cell may be reduced or depressed by growing a transformed plant cell containing a nucleic acid molecule whose non-transcribed strand encodes a protein or fragment thereof.

[0236] Antibodies have been expressed in plants (Hiatt et al., Nature 342:76-78 (1989); Conrad and Fielder, Plant Mol. Biol. 26: 1023-1030 (1994), both of which are herein incorporated by reference in their entirety). Cytoplamic expression of a scFv (single-chain Fv antibodies) has been reported to delay infection by artichoke mottled crinkle virus. Transgenic plants that express antibodies directed against endogenous proteins may exhibit a physiological effect (Philips et al., EMBO J. 16: 4489-4496 (1997); Marion-Poll, Trends in Plant Science 2: 447-448 (1997), both of which are herein incorporated by reference in their entirety). For example, expressed anti-abscisic antibodies reportedly result in a general perturbation of seed development (Philips et al., EMBO J. 16: 4489-4496 (1997)).

[0237] Antibodies that are catalytic may also be expressed in plants (abzymes). The principle behind abzymes is that since antibodies may be raised against many molecules, this recognition ability can be directed toward generating antibodies that bind transition states to force a chemical reaction forward (Persidas, Nature Biotechnology 15:1313-1315 (1997); Baca et al., Ann. Rev. Biophys. Biomol. Struct. 26:461-493 (1997), both of which are herein incorporated by reference in their entirety). The catalytic abilities of abzymes may be enhanced by site directed mutagensis. Examples of abzymes are, for example, set forth in U.S. Pat. No. 5,658,753; U.S. Pat. No. 5,632,990; U.S. Pat. No. 5,631,137; U.S. Pat. No. 5,602,015; U.S. Pat. No. 5,559,538; U.S. Pat. No. 5,576,174; U.S. Pat. No. 5,500,358; U.S. Pat. No. 5,318,897; U.S. Pat. No. 5,298,409; U.S. Pat. No. 5,258,289 and U.S. Pat. No. 5,194,585, all of which are herein incorporated in their entirety.

[0238] It is understood that any of the antibodies of the present invention may be expressed in plants and that such expression can result in a physiological effect. It is also understood that any of the expressed antibodies may be catalytic.

[0239] In addition to the above discussed procedures, practitioners are familiar with the standard resource materials which describe specific conditions and procedures for the construction, manipulation and isolation of macromolecules (e.g., DNA molecules, plasmids, etc.), generation of recombinant organisms and the screening and isolating of clones, (see for example, Sambrook et al., Molecular Cloning: A Laboratory Manual, Cold Spring Harbor Press (1989); Mailga et al., Methods in Plant Molecular Biology, Cold Spring Harbor Press (1995); Birren et al., Genome Analysis: Analyzing DNA, 1, Cold Spring Harbor, N.Y., all of which are herein incorporated by reference in their entirety).

[0240] The nucleotide sequence provided in SEQ ID NO: 1, through SEQ ID NO:6041 or fragment thereof, or complement thereof, or a nucleotide sequence at least 90% identical, preferably 95%, identical even more preferably 99% or 100% identical to the sequence provided in SEQ ID NO: 1 through SEQ ID NO:6041 or fragment thereof, or complement thereof, can be “provided” in a variety of mediums to facilitate use fragment thereof. Such a medium can also provide a subset thereof in a form that allows a skilled artisan to examine the sequences.

[0241] In one application of this embodiment, a nucleotide sequence of the present invention can be recorded on computer readable media. As used herein, “computer readable media” refers to any medium that can be read and accessed directly by a computer. Such media include, but are not limited to: magnetic storage media, such as floppy discs, hard disc, storage medium, and magnetic tape: optical storage media such as CD-ROM; electrical storage media such as RAM and ROM; and hybrids of these categories such as magnetic/optical storage media. A skilled artisan can readily appreciate how any of the presently known computer readable mediums can be used to create a manufacture comprising computer readable medium having recorded thereon a nucleotide sequence of the present invention.

[0242] As used herein, “recorded” refers to a process for storing information on computer readable medium. A skilled artisan can readily adopt any of the presently known methods for recording information on computer readable medium to generate media comprising the nucleotide sequence information of the present invention. A variety of data storage structures are available to a skilled artisan for creating a computer readable medium having recorded thereon a nucleotide sequence of the present invention. The choice of the data storage structure will generally be based on the means chosen to access the stored information. In addition, a variety of data processor programs and formats can be used to store the nucleotide sequence information of the present invention on computer readable medium. The sequence information can be represented in a word processing text file, formatted in commercially-available software such as WordPerfect and Microsoft Word, or represented in the form of an ASCII file, stored in a database application, such as DB2, Sybase, Oracle, or the like. A skilled artisan can readily adapt any number of data processor structuring formats (e.g. text file or database) in order to obtain computer readable medium having recorded thereon the nucleotide sequence information of the present invention.

[0243] By providing one or more of nucleotide sequences of the present invention, a skilled artisan can routinely access the sequence information for a variety of purposes. Computer software is publicly available which allows a skilled artisan to access sequence information provided in a computer readable medium. The examples which follow demonstrate how software which implements the BLAST (Altschul et al., J. Mol. Biol. 215:403-410 (1990)) and BLAZE (Brutlag et al., Comp. Chem. 17:203-207 (1993), the entirety of which is herein incorporated by reference) search algorithms on a Sybase system can be used to identify open reading frames (ORFs) within the genome that contain homology to ORFs or proteins from other organisms. Such ORFs are protein-encoding fragments within the sequences of the present invention and are useful in producing commercially important proteins such as enzymes used in amino acid biosynthesis, metabolism, transcription, translation, RNA processing, nucleic acid and a protein degradation, protein modification, and DNA replication, restriction, modification, recombination, and repair.

[0244] The present invention further provides systems, particularly computer-based systems, which contain the sequence information described herein. Such systems are designed to identify commercially important fragments of the nucleic acid molecule of the present invention. As used herein, “a computer-based system” refers to the hardware means, software means, and data storage means used to analyze the nucleotide sequence information of the present invention. The minimum hardware means of the computer-based systems of the present invention comprises a central processing unit (CPU), input means, output means, and data storage means. A skilled artisan can readily appreciate that any one of the currently available computer-based system are suitable for use in the present invention.

[0245] As indicated above, the computer-based systems of the present invention comprise a data storage means having stored therein a nucleotide sequence of the present invention and the necessary hardware means and software means for supporting and implementing a search means. As used herein, “data storage means” refers to memory that can store nucleotide sequence information of the present invention, or a memory access means which can access manufactures having recorded thereon the nucleotide sequence information of the present invention. As used herein, “search means” refers to one or more programs which are implemented on the computer-based system to compare a target sequence or target structural motif with the sequence information stored within the data storage means. Search means are used to identify fragments or regions of the sequence of the present invention that match a particular target sequence or target motif. A variety of known algorithms are disclosed publicly and a variety of commercially available software for conducting search means are available and can be used in the computer-based systems of the present invention. Examples of such software include, but are not limited to, MacPattern (EMBL), BLASTIN and BLASTIX (NCBIA). One of the available algorithms or implementing software packages for conducting homology searches can be adapted for use in the present computer-based systems.

[0246] The most preferred sequence length of a target sequence is from about 10 to 100 amino acids or from about 30 to 300 nucleotide residues. However, it is well recognized that during searches for commercially important fragments of the nucleic acid molecules of the present invention, such as sequence fragments involved in gene expression and protein processing, may be of shorter length.

[0247] As used herein, “a target structural motif,” or “target motif,” refers to any rationally selected sequence or combination of sequences in which the sequences or sequence(s) are chosen based on a three-dimensional configuration which is formed upon the folding of the target motif. There are a variety of target motifs known in the art. Protein target motifs include, but are not limited to, enzymatic active sites and signal sequences. Nucleic acid target motifs include, but are not limited to, promoter sequences, cis elements, hairpin structures and inducible expression elements (protein binding sequences).

[0248] Thus, the present invention further provides an input means for receiving a target sequence, a data storage means for storing the target sequences of the present invention sequence identified using a search means as described above, and an output means for outputting the identified homologous sequences. A variety of structural formats for the input and output means can be used to input and output information in the computer-based systems of the present invention. A preferred format for an output means ranks fragments of the sequence of the present invention by varying degrees of homology to the target sequence or target motif. Such presentation provides a skilled artisan with a ranking of sequences which contain various amounts of the target sequence or target motif and identifies the degree of homology contained in the identified fragment.

[0249] A variety of comparing means can be used to compare a target sequence or target motif with the data storage means to identify sequence fragments sequence of the present invention. For example, implementing software which implement the BLAST and BLAZE algorithms (Altschul et al., J. Mol. Biol. 215:403-410 (1990)) can be used to identify open frames within the nucleic acid molecules of the present invention. A skilled artisan can readily recognize that any one of the publicly available homology search programs can be used as the search means for the computer-based systems of the present invention. Having now generally described the invention, the same will be more readily understood through reference to the following examples which are provided by way of illustration, and are not intended to be limiting of the present invention, unless specified.

### EXAMPLE 1

[0250] The subtractive cDNA library LIB3229 is generated by subtracting driver cDNA, which is prepared from anther and sprout tissues harvested from lily plants, from target cDNA, which is prepared from early lily ovary tissue harvested from plants at the pre-meiotic to meiotic stage.

[0251] The subtractive cDNA library LIB3230 is generated by subtracting driver cDNA, which is prepared from anther and sprout tissues harvested from lily plants, from target cDNA, which is prepared from late lily ovule tissue harvested from plants at the mitotic to mature ovule stage.

[0252] Lilium asiatic bulbs are planted approximately 1 inch deep in a mix of ⅔ Ready Earth and ⅓ Perlite in 9″ drainage pots. Plants are watered approximately 2 times per week with a 1:400 dilution of Gnatrol. Lily plants are grown in lab U404 on a growth rack in 15 hr day/9 hr night cycles. The average temperature of the room is 70 F. Lighting is provided by TL80 fluorescent lights. Early lily ovaries are collected at the pre-meiotic to meiotic stage. At this stage, buds are 1.5-2 cm and anthers are green. Late Lily ovules are collected at the mitotic to mature ovule stage. At this stage, buds are larger than 3 cm and anthers are brown. The harvested ovary and ovule tissues are frozen in liquid nitrogen and stored at −80° C. until RNA preparation. The RNA is purified from the stored tissue and the subtractive cDNA libraries are constructed as described in Example 2.

[0253] The sprout tissue (green leaves of sprout, without meristem), is collected 12 days after planting and anthers are collected from different aged lily plants. The harvested anther and sprout tissues are frozen in liquid nitrogen and stored at −80° C. until RNA preparation. The anther and sprout RNA is purified from the stored tissues and single strand driver cDNA are prepared as described in Example 2.

### EXAMPLE 2

[0254] Poly A+ RNA is isolated using Oligo dT Dynabeads from Dynal according to the direct isolation method described in Dynal's literature.

[0255] Construction of plant cDNA libraries is well-known in the art and a number of cloning strategies exist. A number of cDNA library construction kits are commercially available. cDNA libraries are prepared using the Superscript™ Plasmid System for cDNA synthesis and Plasmid Cloning (Gibco BRL, Life Technologies, Gaithersburg, Md. U.S.A.), as described in the Superscript II cDNA library synthesis protocol. The cDNA libraries are quality controlled for a good insert:vector ratio.

[0256] Target cDNA library is generated as described above from the target tissues described in Example 1. Once a library of satisfactory construction has been made, 10⁶ colony forming units are grown in a large culture and then plasmid target cDNA is isolated for library subtraction. The poly A region of the target plasmid cDNA is blocked with poly T, which is generated using Not I-oligo dT primer following standard PCR procedures.

[0257] Driver cDNA is prepared from equal amount of mRNA isolated from anther and sprout tissues and driver first strand cDNA is covalently linked to Dynabeads, following a protocol similar to that described in the Dynal literature. The single strand driver cDNA is then stored on ice until subtraction.

[0258] For subtraction, the mixture of the target plasmid cDNA and poly T is heat denatured for 4 minutes at 94° C., immediately placed on ice for 2 minutes, and then mixed with driver cDNA-dynabeads in about 400 ml of 4×SSPE solution. The hybridization solution is heated for 1 minute at 94° C. prior to hybridization at 68° C. for 20 hours. The driver is trapped with a magnetic holder and the hybridization solution is removed from the system for the next round of hybridization with the refreshed driver cDNA-Dynabeads. The driver cDNA-Dynabeads is refreshed by heat denaturation at 94° C. in distilled water for 4 minutes, followed by trapping with a magnetic holder. The water containing the eluted plasmids is removed. The driver cDNA-Dynabeads is then resuspended in the previously removed hybridization solution for a second round of hybridization. This process is repeated a third time. After the third hybridization, the remaining unsubtracted plasmid is concentrated from the hybridization solution by filtration and used to transform E. coli.

### EXAMPLE 3

[0259] The cDNA libraries are plated on LB agar containing the appropriate antibiotics for selection and incubated at 37° for a sufficient time to allow the growth of individual colonies. Single colonies are individually placed in each well of a 96-well microtiter plates containing LB liquid including the selective antibiotics. The plates are incubated overnight at approximately 37° C. with gentle shaking to promote growth of the cultures. The plasmid DNA is isolated from each clone using Qiaprep plasmid isolation kits, using the conditions recommended by the manufacturer (Qiagen Inc., Santa Clara, Calif. U.S.A.).

[0260] The template plasmid DNA clones are used for subsequent sequencing. For sequencing the cDNA libraries LIB3229 and LIB3230, a commercially available sequencing kit, such as the ABI PRISM dRhodamine Terminator Cycle Sequencing Ready Reaction Kit with AmpliTaq® DNA Polymerase, FS, is used under the conditions recommended by the manufacturer (PE Applied Biosystems, Foster City, Calif.). The ESTs of the present invention are generated by sequencing initiated from the 5′ end of each cDNA clone.

[0261] A number of sequencing techniques are known in the art, including fluorescence-based sequencing methodologies. These methods have the detection, automation and instrumentation capability necessary for the analysis of large volumes of sequence data. Currently, the 377 DNA Sequencer (Perkin-Elmer Corp., Applied Biosystems Div., Foster City, Calif.) allows the most rapid electrophoresis and data collection. With these types of automated systems, fluorescent dye-labeled sequence reaction products are detected and data entered directly into the computer, producing a chromatogram that is subsequently viewed, stored, and analyzed using the corresponding software programs. These methods are known to those of skill in the art and have been described and reviewed (Birren et al., Genome Analysis: Analyzing DNA, 1, Cold Spring Harbor, N.Y., the entirety of which is herein incorporated by reference).

1. An isolated nucleic acid molecule that encodes a lily protein or fragment thereof comprising the nucleic acid sequence of SEQ ID NO: 4518 or complete complement thereof.

2-8. (canceled)

9. An isolated nucleic acid molecule comprising the nucleic acid sequence of SEQ ID NO: 4518 or complete complement thereof.

10. An isolated nucleic acid molecule that encodes a lily protein or fragment thereof comprising a nucleic acid sequence that has between 100% and 90% sequence identity with SEQ ID NO: 4518 or complete complement thereof.

11. The isolated nucleic acid molecule according to claim 10, where the nucleic acid sequence has between 100% and 95% sequence identity with SEQ ID NO: 4518 or complete complement thereof.

12. The isolated nucleic acid molecule according to claim 11, where the nucleic acid sequence has between 100% and 98% sequence identity with SEQ ID NO: 4518 or complete complement thereof.

13. The isolated nucleic acid molecule according to claim 12, where the nucleic acid sequence has between 100% and 99% sequence identity with SEQ ID NO: 4518 or complete complement thereof.

14. The isolated nucleic acid molecule according to claim 13, where the nucleic acid sequence has 100% sequence identity with SEQ ID NO: 4518 or complete complement thereof.

15. An isolated nucleic acid molecule comprising a nucleic acid sequence that has between 100% and 90% sequence identity with SEQ ID NO: 4518 or complete complement thereof.

16. The isolated nucleic acid molecule according to claim 15, where the nucleic acid sequence has between 100% and 95% sequence identity with SEQ ID NO: 4518 or complete complement thereof.

17. The isolated nucleic acid molecule according to claim 16, where the nucleic acid sequence has between 100% and 98% sequence identity with SEQ ID NO: 4518 or complete complement thereof.

18. The isolated nucleic acid molecule according to claim 17, where the nucleic acid sequence has between 100% and 99% sequence identity with SEQ ID NO: 4518 or complete complement thereof.

19. The isolated nucleic acid molecule according to claim 18, where the nucleic acid sequence has 100% sequence identity with SEQ ID NO: 4518 or complete complement thereof.

20. An isolated nucleic acid molecule comprising a nucleic acid sequence wherein said nucleic acid molecule hybridizes to a nucleic acid of SEQ ID NO: 4518 or complete complement thereof in 0.2×SSC at 50° C.

21. The isolated nucleic acid molecule of claim 20, wherein said nucleic acid molecule encodes a lily protein or fragment thereof.

The application's sequence listing, which the Patent Office published only in electronic form, follows.

SEQUENCE LISTING (6041 sequences)

SEQ ID NO: 1 - DNA, 429 bp, Lilium asiatic
  Clone ID: LIB3229-001-P1-K1-A1
aaatcaaatgggtaagggaaccggcagcttcggtaagcgcaggaacaagacccacaccctctgcgtccgctgtggccgtcgcagcttccacctccagaagagccgctgctcctcttgcgcctatcccgccgctcggatccgcaaatataactggagcgtcaaggcgatccgccggaagacgactggcactggcaggatgcgctacctccgccatgtcccccgtcgcttcaagagcaacttccgtgaaggcactgaagcagctcccaggaagaaggccgccgccgctgcttccttctaaagagtgagaacttggaattttctggctcaatttagctcaattgttatggatcttgtatgagtgggtttgattccaggcttatgttgttgaatggtgaagtaatgatttgcgaattatgtagacttaaagac

SEQ ID NO: 2 - DNA, 119 bp, Lilium asiatic
  Clone ID: LIB3229-001-P1-K1-A10
gaagataatcttcttgatttcttccccattgcaaagctgtctgctgaaggtttttcagaacattttgtcaaagaaggtctagtagctcttgttgaatacaatgataggaaaatgtttga

SEQ ID NO: 3 - DNA, 379 bp, Lilium asiatic
  Clone ID: LIB3229-001-P1-K1-A11
gtagaaaaaataaattgatatattacccattgcatttttttctgctgaaggtttttcaaaaacattgggtcaaataaggtatagtaggtgttgatgaatacaatgataggaaaaatgtttgaggttaagctggaggagatgaaatcagctttcataacccaaattgataaagaggccggtatatctgaagtcatagagactgcgaagcaatagttcaaggatgcttagttacctgaaattgaaatcatacttattttgtgagatgttttaatggatgtcgttcagaggactgggaagaatcaacaataaaatgcctatgcgacacttccccttgttaaaacttgagctaactgatgaatgcattttacccaaattgtaa

SEQ ID NO: 4 - DNA, 259 bp, Lilium asiatic
  Clone ID: LIB3229-001-P1-K1-A12
ggctttggaagctgcttacaaacaggcaactgggaagtccgtttcactatctgagcagcagctggtagactgtgcctacgcattcaataacttcggatgcaatggtgggttgccgtcccaagccttcgaatacattaaattcaatggtggccttgacaccgaagaatcgtacccctacgccggatccaatggcatttgcaacttcaaattcgacaggattggagtcaagggcaccgacttaattaacatcaccctggga

SEQ ID NO: 5 - DNA, 90 bp, Lilium asiatic
  Clone ID: LIB3229-001-P1-K1-A2
gttggaattggaagaaactctaactttggaatgtgcctcagcggttcaaaagcaactttcgggaacgcactgcagcagcttccaggtaga

SEQ ID NO: 6 - DNA, 475 bp, Lilium asiatic
  Clone ID: LIB3229-001-P1-K1-A3
cccacgcgtccggcctaagacggcggcaaagccgaaggcgaagaaggcggcagctaaaccgaaggcaaaggccgctgccaagccgaaggtgaaggccgctgcgaagcctaaggctgttgccaagcccaaggcgaaggccccagctgccaagccaaagcctgcgcccaaggctgcggcgaagccgaagccggctcctcggccggcgccaaaggctcgccctgcaaaggccgccaagacctccgccaaggacgctcccgcaaagaaggctgctgctccggctaagaaggcattagccccaccaccggctaagaaagcattagccccaccaccggctaagaaggctgtgcccgtgagaaggctgctcctgcagcgaagaagaaggcggcgactccagcgaaggggaagtccccggcgagaaaagcgcctgcaaggaaggcggccaagaagtaggcttttgattcgtgattccgatggg

SEQ ID NO: 7 - DNA, 464 bp, Lilium asiatic
  Clone ID: LIB3229-001-P1-K1-A4
gtagaagagagggttttgcattctattccttcaaatgatagcaattgatactgtagcggtactgaaatcaagaagctctgatccatcactcgtgccttggaaaggtggagtaataattggtgtcctcgactttggtcgtgaagcatgggtccatagagaggagtggatacagaatggaattcacatagggagtggcagaaaatacagtggatcatattatacgcaggcacttgctatgtgttatataaattcttaatagatgcaaggctggttggtttaaagaaaacttcatcttctttaaactggaagagtttgttctcatggaggtgagcatatctctctcaatggtattgattgaagaaaagatgtcggatatgcaccattggaggggaagtgatggctacatccaacatatgtgactttggactagtttgaacatgaaattttggtacaagtgaatgaac

SEQ ID NO: 8 - DNA, 382 bp, Lilium asiatic
  unsure (1)..(382): unsure at all n locations
  Clone ID: LIB3229-001-P1-K1-A5
accacgaagcgtttgctgcaatcaatgctctcaacttaactgagctacttacacaagtaatttatgttgactgggcattcagcagtggcccttccaagcgcagaattgcaaggagaaggtcacctccgcgtgctcgtcgttcaaggagcccgagggggagatattaatgctgttaatttcctaacttgtggcagggggatgagtgggattngaaagcagatttctatgtggtctgagcgttacccatactgctgtcgcgagaggttcatatgaatgcattgaattctgttatgtttcaatgattataagttatggattgatatcggggctgtttagacccgttaaccagacttctggcgattgtggcttggttatgtttcac

SEQ ID NO: 9 - DNA, 458 bp, Lilium asiatic
  Clone ID: LIB3229-001-P1-K1-A6
cccacgcgtccgggagagtgaagctatgcccaagttctcagacccttgctagatcattgcagaggcgagcagtcaggtactccgtcctgggagggatcctttatcgacgatcccacaacgcgcctctcctaaggtgcgtccgaccagaggaggtaaaaaggatcctgactggagtacacgaaggaatttgcggcggccaccccggagctcgcacattggcaaacaagatattgttatgcggatactattggcccagcttgcgtgaggacgcgaaagcccatgtcgacatctgcgacaaatgccaatgctacgcgggcattccaaggctgccctcgaccaagcagatccggtggtcgccgcatggccattcgacatgtaagggatcgaccttattaggccttttccctcttgcccacagaggttgtaaatacaccatcgtcgcggtagactacttcacc

SEQ ID NO: 10 - DNA, 393 bp, Lilium asiatic
  Clone ID: LIB3229-001-P1-K1-A8
cccacgcgtccggcatgatcctgcaggctgtttttgtaccctgacatgaggtttcgagacattgtcagcggttggccagggagcgtgaacgactttcaggtgttaagcagctcgggattcttcaagcaatgcgaccaaggcatgagactgaacgggaagaagattgatctcttggaaggatcggaagtgagagaatacatcatcggtgatgctggattcccgctccttccctggcttatcactccatacactgggaaggaacttacggattcgatgtctgagtttaacaagcggcacttcgccacgagaatggttgttcagagagcactagcaagactgaaagaggtgtggagaatggtcagggagaacttgggcgaccggataggcataaac

SEQ ID NO: 11 - DNA, 455 bp, Lilium asiatic
  Clone ID: LIB3229-001-P1-K1-B1
aacaaaacatggaaagccaaacacaccaacatatatatgttcgatcaagcggcaggtttgatggttcggctccagaaccacgcaagggactaagcagtggtcatatacctaggagtaaatgtatcccctatgaccagatgcttgatagctcacaaatgctgttgtctcccgaagacgccaggaaacggtttgagcaagaaggcatctcgttggatcgtcctgtggtcgcttcttgtggcacaggtgtaactgcatgtatactagtcctgggtctccatcggatcggaaagactgatgtccctgtttacgacgggtcgtggactgaatgggcgtcccaaccagatgcgttattgtcactatgtgatttgactggtgttgtcttatgtccctgtctacgacgggtcgtggactgaatgggcgtcccaaccagatgcgttaattgtcactatgtgatt

SEQ ID NO: 12 - DNA, 303 bp, Lilium asiatic
  Clone ID: LIB3229-001-P1-K1-B11
gcccctccgccttccccttcaggatgtgtacattattggaggcattggaactgtgccagtcggccgtgtggagactggtattgtgagagcctggtatggtagtgacttttgggccaactggtctgaccactgaagttaagtctgttgagatgcaccatgaggctctccttgaagccttccctggtgacaatgtgggatttaatgtgaagaatgttgctgtcaaggatcttaagcgtgggtttgttgccttgaacttcaaggttgaccctttcaaggaggcggtcaactttactttccaggtta

SEQ ID NO: 13 - DNA, 318 bp, Lilium asiatic
  Clone ID: LIB3229-001-P1-K1-B12
cggacgcgtggggatcgagatctctttgctgtttgtcgaggatcggagcttctccgcgcccgtcatggaggttgctaggactgtaaaggacgtctccccgcacgatttcgtcaaggcgtactccgcccacctcaagcgatccggcaagatggagcttcctcactggacggatattgtaaagactgggaagttcaaggagcttgctccatatgaccctgactggtacttcattagagctgcttcaatggcgagaaagatctatctgaggcaaggagttggagtgggtgccttttagaagatataatgggggtcgcaaga

SEQ ID NO: 14 - DNA, 245 bp, Lilium asiatic
  Clone ID: LIB3229-001-P1-K1-B2
cggacgcgtggggtttgcctttatagattctccaagacttttgtcttttctagagggagctggtttacccttcatatcaaaactggctggatcagacatcttagatatattgaaagatgtcaagaaaagatcagagactgtgaacactgacgaagatcccagtggttggcgtccctactttacatttgttgattatttgaatgataaatatacaaagaagtccaagatgaaggtcgatggcagtg

SEQ ID NO: 15 - DNA, 452 bp, Lilium asiatic
  Clone ID: LIB3229-001-P1-K1-B8
cgtacatttctccgacaacgagttgaggcaagactcgccgcacttctcatggaaagcaaggagtatactgaagccctagccatactcacaaacctcgtgaaagaggtcagaaggttagacgacaaattactgctggtggacatcgatctgctcgagagcaagcttcacttctctctaaagaacctcccgaaggcgaaagccgcactcaccgcagcaagaaccgctgcgaacgccatctacgtacccccagcacagcagggcaccatcgacctccagagcgggattctgcacgccgaagaaaaagactacaagactgcttacagctacttctatgaggcatttgaggctttaacgcactcgaggatccccgtgctgtgtttagtctgaagtacatgctgctgtgcaagataatggtgagccaggctgatgatgttgctgggataatctcttcg

SEQ ID NO: 16 - DNA, 114 bp, Lilium asiatic
  Clone ID: LIB3229-001-P1-K1-B9
gacaggcagccgccgatctagacgatccaagcttacctacccgtgtatgcgacgcaatatctcttacatagggaggcctaaatataattcactgggcgtggcaccacaacgcaa

SEQ ID NO: 17 - DNA, 375 bp, Lilium asiatic
  Clone ID: LIB3229-001-P1-K1-C1
cccacgcgtccgcaaggatctcctcccaccatcccaggtggagccactctaatttttgatacgggactcgttgccataaatgggaaaacatcaggcgatgaaggtgaagctgtagtagatgatagcgagctctagtttggctagaattatgaatagcattggcctcttcaaacccctacctagaattatgcaatattttccttgctcaagctaggctttcacaatcaagttcagaaatcagtattatgaacattgacaggatatctataattagatatagggctttgtaagagatgtccgcctttatcatcattcttcgttatatcatgaaactggatatcaaagtaagaatcaattcttttcttacgggaggat

SEQ ID NO: 18 - DNA, 376 bp, Lilium asiatic
  Clone ID: LIB3229-001-P1-K1-C10
gagttatagccatatccgaagaaactgcggaaggcaaactaacacctgttaatgaatcaaagagaaagctattgtttaaaagtatcccgttctcgctgacatgctcgcttcatactacagaagaaactacagaatccaaaaaaacaaaatatatcttaccagacccgactgcagaagaagagaccatcatggatacatttgttacgattgtgttagattcatcgggccggttggtctcaatattcaaagcaggaggtgcagagcttgctttcacatcgacggtccaggactgcatttcccttgcgaagggtagagtgaaggagctaaatagtattttggaggaactctttcagacatgatggaagatgaataggaa

SEQ ID NO: 19 - DNA, 313 bp, Lilium asiatic
  Clone ID: LIB3229-001-P1-K1-C11
caacaaacgtgtctggattggatgtacatctgagaatcgaaggaggtgaagggcctggtaaatttttttgaggttgagagtgagttagccttttatttcttttatatcattccctctttaatgatgtttgattaaggcttattttgtgggtgaatttagaatcaaaacttagcttaaatctatttatccagagtattgtttctggatgtgatgtatgggtatatcaggttactgcatgccccgaatgggaactccatatgtgcttttgggtgcactaattccgaggacccaattggattctatacaagtgacg

SEQ ID NO: 20 - DNA, 299 bp, Lilium asiatic
  Clone ID: LIB3229-001-P1-K1-C12
cgatggcccgcaccaagcagacggctcgcaagttcaccggcggcaaggccccccggaagcaactggcaaccaaggcggcccgcaaaggcgcccctgccacaggcggcgtgaagaagccccatcgcttccgccccggcactgtggctctccgtgagatccggaagtaccagaagagcaccgagttgctgatccgcaagctccccttccagcgccttgtccgtgagattgctcaggatgtcaaggccgatctgcgattccagagctctgctgtgtcggagctgcaagaggcgtccgatgcc

SEQ ID NO: 21 - DNA, 446 bp, Lilium asiatic
  Clone ID: LIB3229-001-P1-K1-C2
attaccgcaacatccttgacaacaaggggctcttgctggtcgaccaccagctcgcctatgataagcgcactcgcccatatgtgctgaaaatggcgaagagccaggagtacttcttcaaggagttcagcaggggcattaagattctcactgagaataaccccttgaccggtgacaagggagagatcaggctgcagtgcaacgtggctaacaagaggcactagatagtgttggtgctgagaggagtgtgtgtggtggccctcctatggatggggacggtgcttgtgatgttgttgctgccgcttttcctttgtttttgtttcggtgttatcggtgcctagctaggattggggtgatgaagatgtattatctatgaaagggagatgttgtaggtggggtttctctaagtggaaagatccatggatgtgtatgggatattatgggtattt

SEQ ID NO: 22 - DNA, 386 bp, Lilium asiatic
  Clone ID: LIB3229-001-P1-K1-C3
cccacgcgtccgcatctacacctgaaaaaagtgaggtatatgcttcttcaggtaagaggatcaccatattggctggctcgattcatggtccttgtgaagtcttaaatttagacaagttaagggaagaaagtgatagaactcaattaggagatacaaatagaggtctacgtccaactttcatgtgcagatggttatatgatgaatcgaagggcgtctttcaatctgtcaacaattaacttagtgtttctattttggacatcagtatctaaatcacaatcagttactcatctttggttatcttttgaagctttaagttattaggtatgcttttcttctatttcttgcatttttgtcggattatggtaatctagtccagttgattgcag

SEQ ID NO: 23 - DNA, 460 bp, Lilium asiatic
  Clone ID: LIB3229-001-P1-K1-C7
cggacgcgtgggcggacgcgtgggctgctgccaacttcttcacaaactgcaatgacaaaacctgagggaaacagtaactgcaagctgtttggaattcagctcgacgtcaacccggcaactgctgagccagcacaggcaaatatagcttgtgagtccgcgtcacacagtcagccagcagtagcatcataccaatcacatgccctagaggccgatccacagcctgaacctcacaaatgcatgctatcggttgatactgttccagcggatgctgagccagaaaaatgcatccaagcttgtccacatgattctaaagatgtccagagcaagcctcaatgtagtaccataagagttgcacgaaggtgcacaaacaaggaattgcgctcggcaggtccgtggatcttacaaaattcaacaactatgatgaattgacagctgagttagacaagatgtttggttttga

SEQ ID NO: 24 - DNA, 374 bp, Lilium asiatic
  Clone ID: LIB3229-001-P1-K1-C8
ctctatcaagaccgcaacatgtagtgttggatcatctttacattcagaaaggaaaggccagccagcctgtggtggcactcagcgagacccacaggtttatgggcaagtatgtcactgtcgtgctctacaagtccttggcgaggtaatgctgatatcaattaccggtatttctagatagctgtttgaagttgagagctttagtgtaaaggtattagtcgaaaaaccgactggataatatcatgatattgtatcaaatgggtgggagatgaaaatggaattttttatagtagatcccgggtccattctccatacttggaaggaatgcttgttgtacggtaatactttagtgcttatgaattataatcggcaacata

SEQ ID NO: 25 - DNA, 284 bp, Lilium asiatic
  unsure (1)..(284): unsure at all n locations
  Clone ID: LIB3229-001-P1-K1-C9
ntcaatcaatatctaaacatgtaaaggtggattttttttacattnanaaaggaaaagccaggcagcctctgttttcactcatggtgacccacatatttataatcaagactgttactggcaatctatacaagtaatttaataagtaatactaatttcaattacacgtatatctagattgctcatataagtatataactaaattttaaacgtattataatataaacacaattaataatattattatattttataaatatagttctaaattaaaatagatacttata

SEQ ID NO: 26 - DNA, 458 bp, Lilium asiatic
  Clone ID: LIB3229-001-P1-K1-D1
aatttgaatcccatcctcaccggcggcggcgatggcgaccctccaatcctcgatcgagagccaccgcgagggcgccgaggtctacacgggcgcccagatctgcaaggagaagtccatggagctgctgtcggagctgcacctcccccgcggcctactgccgctgccggtgctggaggaggtcgggtacaaccgcgccaccggcttcgtctggctgaagcaggcgaagacggccgatcactacttcaagaagatcaagaagcccgtctcttacgcgccggaggtgacggcattcgtcgaggatcggaagatgaagcggatgaccggcgtgaagagcaaggagatgctgattgggtgacgctgtcggagatgtatattgataacccggcgtcggggaagatcacgttcaagactccgtccgggctgtcgaggtctttcccggtggatgcgttcgaggtgga

SEQ ID NO: 27 - DNA, 341 bp, Lilium asiatic
  Clone ID: LIB3229-001-P1-K1-D10
ggcaggggacgtggtggtgagcttgcaccatgcataggtgcaggtggtggtgatcgacgaacacggccctatgaaacttaatgggaaacttaactattgtatatatatataatgtacgaatgctctgtagggtggttatgagcctgcttacacgctatttatgatatgtaatgagcggttttccaataaatataatgtgcggatgtcttactaagctatctatgatttgtaagattacattatgttacctgtccagaaatgcttaaatgtccacgatttcactacagtgtatttatttgagttgtgacggttgaatgtgtgtgagctaattttctgcaatc

SEQ ID NO: 28 - DNA, 331 bp, Lilium asiatic
  Clone ID: LIB3229-001-P1-K1-D11
gggccatcctcaatcgaagattatatatgaaaccttacacggagtgaataagctgatgaaattggaagggcatcttcgaaacaggctactgctcggtgagatggaggttcggtgagtgaagggatctttcaacagtactgggctcatcgtgtcctctaagctgccgagattctctggcacctacactcttgttgtagctagtgttgatccaaagtcaatttctgcaaagaaaactgttcaacttacccagagtgtgaccaaatggtaagttctaactttacattacttttctggtcaagccttagtttacctcgtaaaactgtcatggatt

SEQ ID NO: 29 - DNA, 385 bp, Lilium asiatic
  Clone ID: LIB3229-001-P1-K1-D6
gacgctgcagcaattctgacatctattcagtctctcctctgcgacccgaatcccaactcccctgcaaactctgaggcagctcggatgttcactgagaacaagcgcgactacaaccgacgtgttcgtgaggtagtcgagcagagctggacggccgactaaagtcatttaattgcctatcctgcaacagggagaatgcagtataggtcgtgactgaaatgtatctgtaaaatgacaccttatatgcataacttataaggtttgaatgtgtgaggttgttactggtgctgctgtacattgtttagctgcatgggttgatcttccatttcttcgtgtaaccatgatttgttcaggaactgtcgtttatataaaacatatatttctagta

SEQ ID NO: 30 - DNA, 60 bp, Lilium asiatic
  Clone ID: LIB3229-001-P1-K1-D7
ttactctgcagcaattctgacatatattcaattttttcttttgctacctcaaatcccaac

SEQ ID NO: 31 - DNA, 255 bp, Lilium asiatic
  Clone ID: LIB3229-001-P1-K1-D8
cggacgcgtgggctgacgcgtgggtgtatgcattgatccttgaaagcaaactatgaccatgtgatcagtgaaaaagaacaagtgaatgtgaccgttgaatgagaggatgatctgtactgatagagcgtgtgaaagcaacctctggggctaagatgtagacgtactggccatgtatctttggttgtcacgttaagttgcgttgattctacacatgctggtattataaaatagtgggaaggacgtattgtgagaaga

SEQ ID NO: 32 - DNA, 409 bp, Lilium asiatic
  Clone ID: LIB3229-001-P1-K1-D9
cccacgcgtccgtgctggttatggtgcaaacactggctatggagctgctcctacttggaatgcagctgcaggtggcgggggaggagctgctgcccctactggccaatccccaagtggcgctgctggatatgggaatcagggatatggttatagtggatatggtggggcagagggctcttatggtaatcagggtggttatggtgctgttggtggtcgtggtagcggtcccacaagcaaccctcctggtagtgcaggtgaacaaggttctggttcaggttatatggggggtggctatggtgatgcgactggtagtgtgggttatccaactacttggagatcggaccttcacagggagggggttatggggccggtcaggtgagtgggcctccctggtggtccagctggttac

SEQ ID NO: 33 - DNA, 461 bp, Lilium asiatic
  Clone ID: LIB3229-001-P1-K1-E1
ggggtcgaagaatctttcttaattgagaagtgtattgagcttgagattcgtgcattagttagtactattgtacgatacaagaagcagacagaccagtggcttgctgcatctaatgcaacaaattctattttaaaggagatcggggattttgagaactggatgaagatcatggactatgactgtaaaagcattaattctgcaattcgtaatattcaccgggcatgatgcatgcaattgattgacatgtgaagtctactggagcatttattaagctaattattaggcagagtggagtgttgagcttcgacttctcctgagaattccaggaagttgtgctcatctttattgcacttttaagtgttatggtgtggtgtgacgaagaatttgatacacaattagatatttatggatctagtcctgagaattcccagaaggtgggctcatctttatttggccttttt

SEQ ID NO: 34 - DNA, 336 bp, Lilium asiatic
  Clone ID: LIB3229-001-P1-K1-E10
gcgcccgcggcggcggtgcgagcgtctccggcgaatatttctttgcgcggcgaatttttggaaaaaattttctcatgctggccgtgctcgcaataacagtttatgcccgtctatatttatgcttgaatttttccgaggttatttaattgtatgactgtgtgctttggcggtaatttttcccattataattttctagagagcagagttatttgttgatgatcaataggttgtcggatagtacatattgtagtaccaaactttatccctctatatcaaacatagatacatcttacgccttctagaaatagggatcgaactacatcccaacaaaggtcg

SEQ ID NO: 35 - DNA, 462 bp, Lilium asiatic
  Clone ID: LIB3229-001-P1-K1-E11
gttaatctcgagcttacacctgtccgtccccgtgcaggatttgtgtgaagaacggtggagatggcacacgcgcgagcaaggacgatcaagcagaaagccgttgatgcacgcatggagggtttagatctgaagatggcgatgaagggctctgatttgatgaagtacatggagcagctgggatcagacggactcaaggatgctgcagcttgaagcttgtggaggcgcatgtggaagaagctcgccattggtcatgcatgcgagttgctgggagaagaaagggatgccacaccgaagttcaagcctataaagccccaggccgtgcgaaggtttatcccaagcctcagaagagaaggagcacgactctctgatgctgagccttcatcccctaaaaactgtccttagtgacagaggataatgttgaaggagatggagtatatagggtcgtacttagcttcttgttta

SEQ ID NO: 36 - DNA, 445 bp, Lilium asiatic
  Clone ID: LIB3229-001-P1-K1-E12
cccacgcgtccgggcgaagaaggctgctgtgaagccgaagcctaaatctgctgctgtgaagccgaaggcgaagtctgctgctgcaaagccaaaagcaaaggctgctgcccccaagctgaaggctaaatctgttgctgcaaagccaaaagctaaggctgcagcgccgaagccaaagactgccggtcgccctgctaaggcagctaagacctcggctaaagcagctcctgggaagaagcctgcaccggttgctgcaaagaagccgaagtcagtgaaaaaagctccagcggctaagaaggctccgttggccaaaaaagctacggtggtgaagaaagctaaggctgcgaaataatgcgtttcccttttattcaattgactgtcagtttatttttcatataggcgggtagtcagttgtaaatttattaactgtaagggtgtgttagtgtta

SEQ ID NO: 37 - DNA, 219 bp, Lilium asiatic
  Clone ID: LIB3229-001-P1-K1-E2
aaaaaaaaaaaataaataaaaaaaaaaaaaaaaaatttttttttataaatacaaacataaaaaaaatactgagagacttttacaagaagcgggcagaccaataacttgactacatataatgcaacaaaggggtctccccttttagaggatccaagtttacgaacccgtgcatgcaacttaataatttttttttagggccccctaaattcaattcattgc

SEQ ID NO: 38 - DNA, 458 bp, Lilium asiatic
  Clone ID: LIB3229-001-P1-K1-E9
gataaggaaggcatccctccggaccagcagcgcctgatctttgcaggcaagcagcttgaggacggcagaaccctggcggattacagtatccagaaggagtcaaccctccatctggtcctccgcttgaggggtggtatgcagattttcgtcaagactctcacgggcaagaccatcacccttgaggttgagagctccgacaccattgataatgtcaaggcaaagatccaagacaaggagggcatccccccggaccagcagaggctcatctttgctggtaagcagctggaggacgggaggactcttgctgattacaatatccaaaaggaatccaccctccacctggtctccgtctgcggggaggtatgcagatctttgtgaagaccctcactggcaagaccatcacccttgaggttgagagctccgacaccatcgacaatgtgaaggccaagatccaagat

SEQ ID NO: 39 - DNA, 459 bp, Lilium asiatic
  Clone ID: LIB3229-001-P1-K1-F1
gagatctcagctgcggagcttgagaatttgatgactattgtggcgaatcctcgtcagttcaagattccggattggtttttgaatagaaagaaggattacaaggatggccgctactcgcaggttgtttctaatgcgttggatatgaagctgagggatgatcttgagcgtctcaagaagataaggaatcaccggggtcttcgtcactactggggccttagagttcgtggtcagcacaccaagaccactggcagaaggggaaagactgttggtgtgtcaaagaaacgttgagctctgcttcttctagttttctagtctgagttgggtctgtctctggttgcttttaattttgcttactagcctcgtatccggtagttttggtactgttgcttgtgtttgagatgactttgttttatatcaaggatcttagatattttctatcagactgtcgctacaataaaa

SEQ ID NO: 40 - DNA, 459 bp, Lilium asiatic
  unsure (1)..(459): unsure at all n locations
  Clone ID: LIB3229-001-P1-K1-F10
gctcgctgtgcttatgagttttttgagagggatgggaatcgggcgatccttattgaggagcttgcttcggagctcggacttgggcctaacatcccggtgcatgcagttctccacgattggatcaggcacactgatgggaagctgagcttcctcggttttgtcaagctattgcatggcatctctagccggtcctcagcaaaaccacactgaacaactttagctttaaatttggttgttggccgatagtggacatatctaggcgagccttgctcttgctctcatacatgttcatgactcagactgagtttgactggaaaagctttaggggcttgtgtatcaggagaggaaattcaatctgagattcgatgtagtctcctgctgatctaatgttattgtaggtgtaaatgagcggttaattattttgtnnaaaaaaaaataaaaataaaaaaattaataaaa

SEQ ID NO: 41 - DNA, 467 bp, Lilium asiatic
  Clone ID: LIB3229-001-P1-K1-F11
gctttggaagaggtgagggagctgccacactttttgctggggcagtccatgggaggtgccgtcgcccttaaggttcatctgaagcaagcaatggaatgggatggtgtggttcttgttgcgccaatgtgtaaaattgcagaagatgttacaccgccgaaaccaattttgaaagcattacgtctcatgtcatatgttcttcctgaagcaaaattattccctcagaaagatctagcagagctggcattcagagacccccagaaaagaaaactggctgactacaatgtgattgcatacggtgatcaaatgcggctgaggactgctgttgaacttataaaggctacacatgaatcgaatcacaacttgaaaaggtatcttcgccgttgctgattcttcatggagccgcagaccaagtgacggatcctaatgtgagcaagttcctatataacaaggcttgttccaaagacaaa

SEQ ID NO: 42 - DNA, 465 bp, Lilium asiatic
  Clone ID: LIB3229-001-P1-K1-F12
cggacgcgtgggcccgcccccacccgccactggttcggccgcatctgggcccgcaccggctgcacctcctccccccacttcaggtgcgtcaccggcgactgcggcccccgcatcgcctgcgccggcgcaggcggcgccccccctgccaccctcgcccagatcatcctccaccacggcgaccacgaccagacctcctacggcgtcagcctcgtcgacggctacaacgtcggcatgacagtgacaccccacgacagccgggggcttagaggcgtctgtcccgtcatcggctgcagagccaacttgctgaggagctgcccggacgtgctgcaggtgagggcggcggtcggcgcggggcggcggtggtggcgtgcaagagtgggtgcttggcttacaacaccgacgagctttgctgccggaacaagtataacagtccgatgacgtgcagggcgtcggagtattcgaagt

SEQ ID NO: 43 - DNA, 440 bp, Lilium asiatic
  Clone ID: LIB3229-001-P1-K1-F4
gcaggggcaacaaagaagggtgtggcgacagcgaggtagaggacactgcttcatgctgcaatggtggagccatcgatttccaacttctgttcaaagagagccagaacatgaaggagtcgatgacttgtaaggtttgcggatcgaatgaggtgactatgcttctgctgccatgtcgccatctctgcttgtgcaaggattgtgagagtaagctcagcttctgcccgctgtgtcagtcctccaagtttattggcatggagatctatatgtagtgagagtggttaacaccaccctaagtcctgaactttataattactgcaagtttgatgtgtatatctccctgtatttctagataggtgctgaagaacatgaacaatttccgtgggctttggtggtatgttgtcgatgtatgagtaaaagatgtttcgtttgaacttcccccg

SEQ ID NO: 44 - DNA, 192 bp, Lilium asiatic
  Clone ID: LIB3229-001-P1-K1-F9
ggttgctgatatttaataacttagtgttagagcaatgatacggcactttcccgtctgaatgatttcgtagcgggtagcatgataattatatttagttataccttactgatttttgtatattaacaatgtaatattgcctgtctgcccggatgaaaacttaggactatgtgccagagatgtttttctgcttcc

SEQ ID NO: 45 - DNA, 461 bp, Lilium asiatic
  Clone ID: LIB3229-001-P1-K1-G1
ggatttgctaaagaatgctgagagtaatgcagatatgaaaggcttggatgttgatgccctctacatatctcatattcaagtgaatcaggctcagaagcaaaggcgccggacatatcgtgcccatgggcggatcaacccttatatgtcctcgccttgccacattgagctaatcttgtctgagaaggaagagccagtcaagaaagagcctgaaacccagattgcccagaggaagcctaagaaagctggagttctccgtagtggtgcttcatcttaaaccatttcaaatctttctgattgtagaactctgttgcagttttaaacaatttcaaatatttttatttgagcgacttcttttgcagttttggggtgtattttgtttagacaattatctaccttcgtagtgtgatcaatgcgacttattttgctagttttattcttgtttaactgaatgtgtttgagaa

SEQ ID NO: 46 - DNA, 456 bp, Lilium asiatic
  Clone ID: LIB3229-001-P1-K1-G10
catggctcgcaccaagcagactgctcgcaagtccaccggcggcaaggcaccccgcaagcagctggccaccaaggcagcgcgtaagtcggcaccggccaccggcggcgttaaaaagcctcatcgcttccgccccggcaccgtggcgctccgggagatccgcaagtaccagaagagcacggagcttctcatacgtaagctccccttccagcgccttgtgagggagatcgctcaggacttcaagactgacctccgcttccagagctctgctgttgcggcactgcaggaggcggcggaggcgtatcttgtgggtctgtttgaggataccaacctctgcgccatccacgccaaggtgtcaccattatgcccaaggatattcagctcgcccgacgcatccgtggagagagggcttgatcggcagagagctcgatctcattatgtttagttttaagctttctc

SEQ ID NO: 47 - DNA, 442 bp, Lilium asiatic
  Clone ID: LIB3229-001-P1-K1-G11
catggctcgcaccaagcagactgctcgcaagtttatcggcggcaaggcaccccgcaagcaggggggcaccaaggcagcgcgtaggggggcaccggccaccggcggcgttaaaaagcctcatcgcttccgccccggcaccgtggcgctccgggagatccgcaagtaccagaagagcacggagcttttcatacgtaagctccccttccagcgccttgtgagggagatcgctcaggacttcaagactgacctccgctttcagagctctgctgttgcggcactgcatgaggcggcggaggcgtatcttgtgggtctgtttgaggataccaacctttgcgccatccacgccaagctgtcaccattatgcccaaggatattcagctcgcccgactcatccgtggagagagggcttgatcggtagagagctcgatcttattatgtttag

SEQ ID NO: 48 - DNA, 436 bp, Lilium asiatic
  Clone ID: LIB3229-001-P1-K1-G12
agaaaaatgactattttcagagacatagtcttcatctccaccctcctcctcctcctcctcctcctctcccctctcagcttccaacaggccaccgccgaaaaaggcggctacgatctgttcgtcctcgccgtctaccggactgcccacgtgtgcgcaaaggacaacaaggacaactgctgcttcgtcaacgaatgctgcagggtgaggcctaaaccagagttcacaatccattccttctggccaaattatgcaaaccttacatcctggccacggtgctgcaccaaaacctagctcgatcagacgcaggtttcagctctaattccggccctcgaggagttctggccaccactgaatgtggtcctgcaaaccatctttcgcattgcgacggtaccgagtcactaatttgggagcatgagtgggagattcatgggactta

SEQ ID NO: 49 - DNA, 205 bp, Lilium asiatic
  Clone ID: LIB3229-001-P1-K1-G2
ggtgtttgaagagtatgagcaagagtaagggttttgaatgcattgctagtagatcgaatttatttaatcaatttgtcggagtgaaatgttagaccctccttagcctgggattgtttttactgcttaattggtgataacttataggcagctaccaaatttgtaatcttctttatatatttaccttttaaggcaatttttgtgagtt

SEQ ID NO: 50 - DNA, 101 bp, Lilium asiatic
  Clone ID: LIB3229-001-P1-K1-G4
tctataggatccatttttatttacgcgagcatgccacatcataggtggccactaatgcaacccaagaggtgggtcactgccaccccttatacaacaaagac

SEQ ID NO: 51 - DNA, 153 bp, Lilium asiatic
  Clone ID: LIB3229-001-P1-K1-G5
ccgcggaaggtatccgacgaatgtggcgaatgtggagaattatgtgattgcgccgtataagcatttggtgaagtcgtttgtggaggattcggcggggtttgatgatcgtccgactttgttgtattttcagggagcgatttaccggaaagattg

SEQ ID NO: 52 - DNA, 432 bp, Lilium asiatic
  Clone ID: LIB3229-001-P1-K1-G7
agaatatcatggtgcatgagcacatatcactatttttctcatgattgagaacaatacaactggaagagcattattagaggccaaaggagcacccattgtagaggatatgtactcatgcccacagtcagagcaaaagaccttgggtaggctcttgaaatcgaaacttagtgtgaatcatgaagataaatgcgtcgtatatacgagggatcttagagcattatctaagaaaataaaacaaagtatgtcgggaataatcatcaataatgctcacataatacaaatacctagaataagtggagataagagatagaccccaaatatcagaatatactaagtcaaatgagcaatactctgtagttggaaatgataaaatactaaactttggccatttttaaaacatgattatatgaaagccttaatgaagaaactaca

SEQ ID NO: 53 - DNA, 435 bp, Lilium asiatic
  Clone ID: LIB3229-001-P1-K1-G8
gactgatatcaaaacatgtgtgcgagcgtatgctttaagcgcatctgaaggcgactgcttaggtgttttatttatagatggcagtggatcgggccagttacctgaagggctggcatatgcaggatgcaaagcaggagtgaactgttttacctggtaaagactatcgagctcgtggtgttctgactatggtgaagctaacatcaccagtggaggataaatatcagattacattacgtatgatgcagaatcaatgtctttacactgtagaaatgaggacaatgtccatgcagacacatgtgacactcgaccctgcgttgactttacttattcggcatctgacgacgattcatcagaatatgtgagcggcaatatgcttgattatggatgttagtgctaccctggcaggcgtgcttaagaagtcataccctttggact

SEQ ID NO: 54 - DNA, 360 bp, Lilium asiatic
  unsure (1)..(360): unsure at all n locations
  Clone ID: LIB3229-001-P1-K1-H11
cacgccgtctcgctngacggcgtcaaggggcgccgattncgtcggcggccaccttcatcctagtcgcnntccgtgaaaccccgtctcgaagaaccatagaggagaagaaggcgnngttgatctgccgacccttncacctactggctccgcctttcaaccattctcgcagggagtcttcgaccccgccaganttcttctctagacccattgtggaggtgccagtaccttgaagaccaaatnntttgtattttgggtggtnncttttggctgcccanntttatgtcaaggggcgatgactnnntcagcttaaccttnccggattttacccatggtttnngggatggtattacctnntcgttt

SEQ ID NO: 55 - DNA, 462 bp, Lilium asiatic
  Clone ID: LIB3229-001-P1-K1-H12
atttggtttcgtattttcccatgttcattctgtctaatggtgattttcaatggacattgttgttgtcagtctagctgataaaaaagtgtaacatgagatcattttatgtttgatactgagattattgactggtgcgaattcaactggtgttgtgcgcccatattttgggtgtggctaaatcaacaatatggtctgtttttaggtttaggtcacatatatatgatgtagatgactttaaatttacttttgattttactttgtttattatgtatttctacgtttggggtagcgttttatttactatattccatttgattatgaatgctttttgttttttatggtgcttatatcttttttttgtgttttgtaactacttttacttcattatttgtttattataagccttttctttattattaattctattttcttttataaaatatatatttaattgtattattt

SEQ ID NO: 56 - DNA, 326 bp, Lilium asiatic
  Clone ID: LIB3229-001-P1-K1-H2
tggcgaaaatgccttatctgaaggcggtggtgaaagatgggttacgaaggcacccggccacgcactgtgtgctgccgcatgcagtgacagaagaagtatacttaggagggtatgtgatttcaaaggaggcaaccgcgaacttcatggtggcagaatataggttggaatggtgagatgtgggatgagccgatggagttcataccggagaggttttttgacaaggcagaatgagaaggtaaggctctaactgccagcaaaccgataaagataaaacctactaaagaggcgaggatggaaaagactctgagaggcatgcacgtgctgcc

SEQ ID NO: 57 - DNA, 406 bp, Lilium asiatic
  Clone ID: LIB3229-001-P1-K1-H3
agccttccggtaaagttttccttagaggagccaaggtctatgccatttccgcagaatattgctttagagacggtgactggactcgataatgtggaaaaatcgaaagagggagatcaaatcgagtcagataatgcaggagatgtagaagccaaggattacactgatgtggagcctagaatgactgcattaaagaagaggaaagccaactctcgtaaaggcgagcttagttatcagccagtttctccgattatcgcgttagagaaaaccacgagcctggagggagatgcaattgaagcaaatgtgaaagatgtgaaagaagctcaagcttgcgatgatgcggaatacaagaggactaagatgaaccgataacagtttcaacctgagtggttgcagataataattctgt

SEQ ID NO: 58 - DNA, 171 bp, Lilium asiatic
  Clone ID: LIB3229-001-P1-K1-H4
cccacgcgtccgaggcaacaaagatcgaagcagacaaaataaaaataaactctgaatgtaatttaattgcttactatgcattaaatattcagattttaattgatgtgccctatcctctttttgtgtgtatattatgtttatgttgtgagttttaattgataaccaagattc

SEQ ID NO: 59 - DNA, 446 bp, Lilium asiatic
  Clone ID: LIB3229-001-P1-K1-H7
ctcatgcactgggttaccctttttgtttttatttttcaacttagttttaaaggtgataatattgaaaaatgtattcttgtagatacaaaacaatcgataattgatcccaatgtttccacgcttaagatgcaaaactataaatgcatatgcctcaaacatcttatacatattgcgatgtctcacggtagctatcttttttctgatatctcaatacaatatctaccaataagctcatgctattcaaaagcctcaccaatctacgttgagcgtgtccacatatttgtctactctttaggggtcatagtgtaattgttattcgataatatattcatcaatttttgatgattcataatataccgtgatacaacgaagattcatataaatgatatattacttttaaaagatgagcatttaaatttttttagaacaatgagaatttatatgcc

SEQ ID NO: 60 - DNA, 427 bp, Lilium asiatic
  Clone ID: LIB3229-001-P1-K1-H8
cccacgcgtccggcaaaattaggataaccccaaattgcaccattactatattcaatagactaaaaagagagcctgagcacctccttaaaatgtgagtattaaagccgctatcattgatgaacgacttgagccttagtgttacctgaattggctgaatgacactagaacctctcatgtggaattaaccaaccacaatagaatgattatagaataacgagatagactagagaatagaccaacccgagagacccttaaccacctggctatgtcaatcatatgatgatcaatatgcgactagtcatgcatactttagccttagtccctagtgatcttagagaccaacatgtttgagttatgactacctgtgcttttatcataaccctattagtcggagcccacaatcatttccctcatgagagactcaaac

SEQ ID NO: 61 - DNA, 492 bp, Lilium asiatic
  unsure (1)..(492): unsure at all n locations
  Clone ID: LIB3229-001-P1-K1-H9
gcaccgtaccggtcntctggaattcctcgggtcggaccctacgtcgtctcgcccaacgccgtctcgatccaaatcanntgggtgtnctctaaggtatnngtctcaaatccatacccnngctacgannactcttcgagaaaggannttgacgactcctctcgtggaaagggnnagaagtatnnngtgattatttagcaactattcctctactagctagccgacttgggttgacgagggattaatnngatgctattcaacggannaaatcaagactcannaggataaaacctagcatctgnngattctggggttttttgaaccggcnnatattatcaacatagcgttgagctctagaaggtaactcaagctattcagattcgtctgttgttttatgaggtaaaatataatctatagaagttttgatgattcttatgaatatatattcgcaaacatggactataaatttaattttatcaatagaagttcaactaa

SEQ ID NO: 62 - DNA, 345 bp, Lilium asiatic
  Clone ID: LIB3229-002-P1-K1-A1
tttttggaacaattagcaaggctaatcgttttaattgaagtgtcaagaattcaaggtgttactacaactcgtaacggggctatcttttcggtgaactaaacgccacaaatatctagtacgccttactactacgcagtgaagtcttatacttcacaagcagaaagacgtgaacaacagtggttcgtttctggtgaagccaactgaagtcgtattgcagtaagcataccatggcaagttggtccaacagatagccatactttcaagcagagaagcttgaaatccctcttactcccaccacagttttctcaagcagagaaccaggaatccccatccctaggacatacc

SEQ ID NO: 63 - DNA, 261 bp, Lilium asiatic
  Clone ID: LIB3229-002-P1-K1-A12
caacaacactatgatcagtttcaacatgcttgaagctgcaaggataaatggagtcaagagattctgctatgcatctagtgcatgcatgtatcccgagttcaagcagctggagacaaatgtcagcttaaaagagtccgatgcatggcctgccgagcctcaagatgcttatggccttgagaagcttgctaccgaagaactatgttagcactacacgaaggattttggaattgaatgccgcattgggcggtttcataatatcta

SEQ ID NO: 64 - DNA, 299 bp, Lilium asiatic
  Clone ID: LIB3229-002-P1-K1-A2
cgactccaaactcataataaacgagataaaggaaattacagaggccatgggatggaggagtgagttgcgtgacacagctgaaggcccctatgcgagccggaaggtcttgatgtcccagaagccgatgcctcggccccgatcttaaaaggtagcgtgaaggtgttattctttcaaaagtgaagttgactaaggctctttatgaaattaatttatatgtgatagtattttcattcttaagttgttccagaccattctattggttttatatatgtggtgggcaataatttgtctttcttgct

SEQ ID NO: 65 - DNA, 459 bp, Lilium asiatic
  Clone ID: LIB3229-002-P1-K1-A3
gaatctttactcggctccataccatcattaccacataccagaaatagcaaacaagattgatacacaagttgaagaagatgaaatcagaactccctatgtatcatgtatgtgggatgcaagggacaaagtggaaccgactccagaaatgaatcagcatgaaaattatcctgaggccagagagataactgcaccagaatgctatcaagaaagtggaaacctcccaaaagacacgagcttggcttctgaacaacatgaaagcagaaatgaaagtagggctgaagacgcatccatctttgtgaaaaatgacttgaaagttgaagttactgaagaagccaaagaagccaaaaagaacctggaggaactccaatcagccgaaaggggcatcagatgcagtgaaactgagacgatagaggcagtagaatggggatattacgaggaaaataaaactgatgctcaaat

SEQ ID NO: 66 - DNA, 336 bp, Lilium asiatic
  Clone ID: LIB3229-002-P1-K1-A4
gtgggacgaaagggacaaaggggaaccgacggcagaaacgaaacagaatgaaaatgaacccgaggccagagagacagctgcaccaaaatggtaaaaagaaagaggaaacgccccaaaagacacgagctaggcctgagaacaacatgaaagcagaaatggaaggagggctgaagacgcatccatgtgtgggaaaaatgacaaggaagctgaagtgactgaaaaagccaaaagaagccaaaaagaacctggagggaactcaaataggcgaaagggggataagatgcagggaaaaatgaacaaaagagggggggagaatgggaaaaaccacgagggaaa

SEQ ID NO: 67 - DNA, 209 bp, Lilium asiatic
  Clone ID: LIB3229-002-P1-K1-A5
gagctgagggcatctgcaaccctatcattgcattatgtctcatggcggtgctggtccagatatgggtggtatggatgaggatgaggatggcctacaggaggcagcagcgctggtcccaagatcgaggaggccgactaagtttacttttataattgcttatatttaggtaactcgataggatttcacttgggctcatcttgccttttgac

SEQ ID NO: 68 - DNA, 99 bp, Lilium asiatic
  Clone ID: LIB3229-002-P1-K1-A6
acccacgccgttcgatgagtaccgtctcttcagtctcttgcagagtaggttatcttgtttattgctgctcggagtgaatattaggtggacgaggttcca

SEQ ID NO: 69 - DNA, 274 bp, Lilium asiatic
  Clone ID: LIB3229-002-P1-K1-A7
cgactcctaactcataataaacgttttaaaggaatattcttttttccatgggatggaggagtgagtggcgtgtcacatctgaaggcccggatgcgagccagaaggtcttgatgtcccataagccgatgcctctgtcccgatcttaaaaggtagcgtgaaggtgttattctttcaaaagtgaagttgactaatgctctttatgaaattaatttatatgtgatagtattttcattcttaagttgttgcagaccattttatcggtttcatatatttt

SEQ ID NO: 70 - DNA, 281 bp, Lilium asiatic
  Clone ID: LIB3229-002-P1-K1-A8
cgactccaaactcataatgaacgagatataggaaatttcatattccatcgcatggatgagtgagtggcgtgacacaattgaaggccggtatgcgagcccaaaggtcttgatgtcccaaaagccgatgcctggacccccttcttaaaaggaagcgtataggagttattctcacaaaagtgaagttgactaacgctatttatgaaaagaatgtatatgtgatagtatttacacatcttaaggtgtctcaaaccataatagacgttttatatatgtggtgagca

SEQ ID NO: 71 - DNA, 326 bp, Lilium asiatic
  Clone ID: LIB3229-002-P1-K1-A9
ctccgcatacccttgtgtcctataacgcgagcgtacgattttccatttctatgcggacggactcattcaggcgtcgatatagatgtactagcgagtgacacatattcaatttactggccgccgggttacaaccgcaaccctgtgaaaacactaacaatactcaaaataatcgtcttgcaccacatacaactttacccagctgtcgtaataacaaagaggcccctaccgtacgaccttcccaacatttgatcatcctgaatgcagaattgtacgcaccgtttatcgccccttcatcttcgttagaaatgacttgaaagatgcagtta

SEQ ID NO: 72 - DNA, 206 bp, Lilium asiatic
  Clone ID: LIB3229-002-P1-K1-B10
gtcaaagtccatgcacaagaaattaaacatttagcttctatgagagagaggtcgatcatgagcagggtaaagttccctcggggagagagggcaaaggttttcactcatctacaaacacgatttgaataaaatgagctaatgactcaagctaatctggtgagatggaccatagattatctgtaactctgggaggttgaccacataca

SEQ ID NO: 73 - DNA, 218 bp, Lilium asiatic
  Clone ID: LIB3229-002-P1-K1-B11
gtcccaccaccggctaagaaggctgtgcccgcgattaaggctgctcctgctgccactcctaagaaggccgctcctgcagcgaagaagagggcggcgactccagcgaaggggaagtccccggcgagaaaagcacctgccaggaaggcggcccagaagttggcctttgattcctgattctgaagggagcttggttgcaaatgggctaaggtctgaggggc

SEQ ID NO: 74 - DNA, 452 bp, Lilium asiatic
  unsure (1)..(452): unsure at all n locations
  Clone ID: LIB3229-002-P1-K1-B2
ctagccttaaagtcgtagacgtttcaagcaatgatttatgtttaaccattcctactgcggggcctttcgagcacatccccttgaacaacttggagaacaatcctcgcttggaaggtccagagttgttgggccttgcagcgtatgaaatgaactgctgaaacaaaatggtgacgaagtcacaaggggggtccataccaagatagaagactatatatatgttgtgtttggtgatatatttaggcgtaatgtgaaatctacattagcagctaccttctgttgatgtcacttgtttcagtattgctagattataatgtatagatagttatggcgatgttacccgaattttaataaaatgtgtactaaagtgctagaattattgtggcatgtgatatgtcaaaanaaaaaaatatatatttatacattatattaatgggcggccgctctagaggatc

SEQ ID NO: 75 - DNA, 347 bp, Lilium asiatic
  Clone ID: LIB3229-002-P1-K1-B4
atgatacctaaaggtgaggagttggggtttctggttgaactgttgaaggaggggaagctcaagacgggaggcgattccaggttttctcttagtgacgcggaggcggcttgggcaaagagcattgacggtcatgctactgggaagataatcgtagagacgtgagctttgaggatctgcataggcagagtactttttcatggttaaggtgcttgtattatatttatgaaaaagatgttattcgatcggtatgatttactgggcgtaggcatgcacggtacttttacatgggtgagatggtggatcatcactaccgaccgataccttgcatgataaaagcgcatatattt

SEQ ID NO: 76 - DNA, 447 bp, Lilium asiatic
  Clone ID: LIB3229-002-P1-K1-B5
gattattagccatgaaaatatactaaacattgcattctttttcattgcacgctacaaatgatgagatcggaaaactaagattattagtcaggaacgtgtaaagcaatgttacttgtcaaatgaagcagtttgcagcttaattatatgggtttatctcctattttggcgggagagaaaccgaagcagcttattgggtttatcacacagcttcttgggcttatcacattattctccctcctatataaggggccaagccgtgagtatctaaatcatcaaaaaataaaataaaagacagaggagaggctagactgaccaaataaagccatatcggtccaggaggttagttgctttttgaagagctatctacaaagtagaggtgaaggattgctgacatatgccaaactggatcttaaatctagcgacatgtctaaatgtgagataaatatt

SEQ ID NO: 77 - DNA, 213 bp, Lilium asiatic
  Clone ID: LIB3229-002-P1-K1-B7
ttccctttagttttagaccgagcacgcccgcttttgtgttatcactctcacacacccattcatgccacgttctatctcttctatgggggcgagctacactcaattcactgaccgtccatttacaacttcctatcgctatacaacctatgtactgctcaaacaaaatgctgtccaaaacacacctttttcccctactaatataatagccaatat

SEQ ID NO: 78 - DNA, 392 bp, Lilium asiatic
  Clone ID: LIB3229-002-P1-K1-B8
gagagaagggcaaaaagaccattttgcccctcgcagctcttcccctagggttccgatcgttgagatggcggcgatgaagaggcttccgatcggcgtgctggccgtcgtggcgatgatcttcgcgattgccctgccggccgtgcaggcgcaggctccggctccggcaccgacgagcgatggaacatctgttgatcaaggagttgcttatgtgctgatgcttgtggcactggtcctgacctatctgattcacccgctggatgcttggtccccaatcaagctgttctaagttgtttgggagggagagattagattgaaattgtgtttgttattacttggtatcatggttaattgagttggtagacttctctatatagttgggttgcttttgtgtt

SEQ ID NO: 79 - DNA, 433 bp, Lilium asiatic
  Clone ID: LIB3229-002-P1-K1-B9
gggtgagtcttggtgcgagggccggtgctgtccgagcgcaaggtgatgtggcatataaaaccagcctagaggccaccctgcgtgacaaggactatccgttcggccaatcaattcaaaccctaggattgtcattaacgagttggcgtggtgacttgactttggagtccgatttgcagtcgcagttctcaattgggagaaattcaaagatgtcgattcatgctggtctcaacaataaacggagtggacagataacaatcaggacaagcagttccgagcatccccagttagcacttgtgggtattattccacttgctatagctttatacaggcgcatatggcctggtgattcgaagccctattagcgacttctgggatcaggttttctgcgagtcttttgatattgcgcatagtttcatcttggtattttctggta

SEQ ID NO: 80 - DNA, 441 bp, Lilium asiatic
  Clone ID: LIB3229-002-P1-K1-C10
gtcaaattccatgcataatatatcaaaaaagagtactttatgagagagagtttgatcatgattatggtaaagttcccttgtttatagattgaaaaggtatttatagttcttcaatcatgatttggataaaatgagctaatgattcaagctaatctggtgagatggattatagtttatctgtaactttgggaggttgaccacatacatgagttgtatgtgagggtaaggttgatgctctgtgaaggtcaggtggctatttgtattagatttatttgtgagtcagtttctaatccaatataccgatatggattatatttgttgtaatagtcttatcaggcttgactaaggggtccaagtttagtatgtggggtacatatttgggttgagtatacacagttgttcgttctcacaaatgggatgacccaaaagaaagagggagat

SEQ ID NO: 81 - DNA, 443 bp, Lilium asiatic
  Clone ID: LIB3229-002-P1-K1-C11
gtcacactccatgcataatatatcaaaaaagtatttctttatgagagagagctcgatcatgattatggtcaagatccctcagtttatagatcgaaaaggtatttatagctcttcaatcatgatttggataaaatgagctaatgattcaagctaatctggtgagatggattatagtacatctgtaactttgggaggttgaccacatacatgagtcgtatgtgagggtaaggttgatgctctgagaaggtcaggtggctatttgtattagatttatctgtgagtcagtttctaatccaatataccgatatggattatatttgtgtgaatagtctgatcaggcttgactaaggggtccaagtttagtatgtggggtacatatttgggttgagtatacacagttgttcgttctcacaaatgggatgacccaaaagaaagagggagat

SEQ ID NO: 82 - DNA, 447 bp, Lilium asiatic
  Clone ID: LIB3229-002-P1-K1-C2
cggacgcgtgggttgccgtgctcacaagttccatcttttttaccattcatgtctgattccattggtcacggtccaatgattgatggtggcgcactggcccgcgttatcttgttagtgctgaatctgctttatctttagcaattccaccattgcttccaacctgtgcaagccctcttatctcacaatctgagtcagcggagatgaacgctagggaaacactaagaatgctcatggctagtgcaccaccatcaacctgtccgccattcatgacaatgctccctcaagttttaaatagctccgaggagatgttcccttatgctcatgtgagcaagcgggagataattgcggctggcagcccaggcctttatagtggtgtactagatgtgaaagctgtcacaagtggtttatctctaatgactttttcaacggcaacacataatcttgctc

SEQ ID NO: 83 - DNA, 272 bp, Lilium asiatic
  Clone ID: LIB3229-002-P1-K1-C3
ggtgtggttaccgaggagtgtgatccttacttcgtcaacactggttgctctcatccaggctgtgaacctggttttccaacaccgagatgtgtgagacactgtaaagataaaaatcgggtttggaggacggataaacattacagtgtaaaagcttacagagtgaagtctactcctaatgatatcaatggaagaggttacaaaaaagggtccctgggaagtggcgtcaactgttatgaggaatttgcttaactaaaatcaaggcttttccaaaa

SEQ ID NO: 84 - DNA, 438 bp, Lilium asiatic
  Clone ID: LIB3229-002-P1-K1-C4
gctaattccaagaggcatggaggctgaaaaggatatcaattgctctgctgggcggaaggactgagcgaggaagaaggccgtctcgaagaccaccaaggccggtctccagttccccgtgggtcgcatcggccgctacctcaagaagggccgatgctcacagcgtgtgatgtacggaggtcccgtctaccttgccggcgggcttgagtaccccgctgctgtggtgctggagctggcaggggatgcagcaaaggacaacaagaagtctcgtatcatcccgaggcatttgagtctcgcggtgaggaatgatgaggagttcaacaagctgctggccagagtcatcatcccccatggaggcgtacccccccacatgcacccactctttcgaaagaagactgctgatgctgcaaccactcccccaagaagcccaccaagtccccc

SEQ ID NO: 85 - DNA, 346 bp, Lilium asiatic
  Clone ID: LIB3229-002-P1-K1-C5
cccacgcgtccgcccacgcgtccgcgaagatccattacatgttagggaattcctccggaccagcagaggctcatctttgctgggaagcagctggaggacggtcgcacacttgctgattacaacattcagaaggagtcgaccctgcaccttgtcctccgtctccgtggtggccagtaatttctcttttctgatgcttgccgcttatttctctgctctgatccttggtttcgtttctcctttcttatgttccatctgttgttttcttatgttcatctgtggtttgatggttaaggtcttgtgacttgtgtccttttaaatactggttgaataataagttctagatttg

SEQ ID NO: 86 - DNA, 417 bp, Lilium asiatic
  Clone ID: LIB3229-002-P1-K1-C7
ccacgcgtccgccaaaccctaaccctaatcctgccacctccaatggcctctgctacaatggccatcgccgcgccagcaatcttcaaccctatgaaggtctctccgagggccgcccccaagatcgcaaagccgacgcggttcgcggtcagggcgtcactatcaacttccaacagggagaaggccgtgtcagtggcgacggcagcggcgatggcggcagcgctggtgctgccagagatcgcggaggccgcgcagccgggactgtctccgtcgttgaagaacttcctgctgagcattgtttctggtggggttgtgttcactgctatcatcggacttgtcatcggagtctccaacttcgatcctgtcaccagggcctgagagaagattgtggccggcggccacagtacgtattggagccta

SEQ ID NO: 87 - DNA, 59 bp, Lilium asiatic
  Clone ID: LIB3229-002-P1-K1-C9
gccagcccggattccgctcctagcgtttaagggcagtaaagcgtagttggcttgggttg

SEQ ID NO: 88 - DNA, 441 bp, Lilium asiatic
  Clone ID: LIB3229-002-P1-K1-D10
gtcaaatttcatgcataatatattaaaaattttcctgcttgagagagagccagatcatgattatggtaaatttcccttggtgatagattgaaaaggtatttatagttcttcaatcatgattaggattaaatgagctaatgattcaagctaaactggcgagatggattatagtttatctgtaactttggtaggttgaccacatacattagttgtttgtgagggtaaggttgtcgctctctgaaggtcaagtggctatttgtattatatttatttgtgagtcagtttcttatccaatatacccatatggatcatattcgcttgtaatagtcttatcaagcttgactaatgggtccatgttttagtctgtggggtacatattttggttgagtatacacagttgtttgttctcacaatgtgtttcctcaaataaagagggtgatt

SEQ ID NO: 89 - DNA, 437 bp, Lilium asiatic
  Clone ID: LIB3229-002-P1-K1-D11
cccacgcgtccgccaggaactggggtactgtgaattatgatgtgcttgcacaggaaactgaggaggtcctgaatgttgaagagaaggctgcaactgataagctcccagagcagggagatgtgcctactgaagcaattaaggaaaacaaagaaagcccaacagctgaagtagtggagaaagaagaggataaggagatgaccctagaggagtatgagaagataagggaggagaaatgaaaagcacttctggaaatgaaagctgaagagaggaaagttgtagttgacaaggagttggaggccatgaagccgctttctgttaaaaaagcaaatgatgacatttctattaaattgggttccgacatgggcactggaaagaagaaagaaaatactgagcgggaaggagggaaaaagccatcgtgtttcaatgtatttctttag

SEQ ID NO: 90 - DNA, 439 bp, Lilium asiatic
  Clone ID: LIB3229-002-P1-K1-D12
gaaagttggctatgtctagcgggaagaggggcggtttcggcggcggtggtgctggcggcgacttcatggcggaggacgaagaacgccctggcttcgcgcagattccgacaagcttcggtcctgaactgcgcgcttgccttcgctgcaagctcgtcaagacttatgatcagttccgggagtctggctgtgaaaattgcccctttttagaaatggagaaagataatgacagtattgtcagctgcaccactcccaatttcaccgggataatctcagtcatggatcccactagaagctgggccgctagatggctgagaattggaagatttatccctgggtgctacacacttgcagtctccgaggaactccccgaggaatatcagagtgtttgtgctgacaacaatgtgcaatatggaagacggtgttaatggccagatgtgtt

SEQ ID NO: 91 - DNA, 441 bp, Lilium asiatic
  Clone ID: LIB3229-002-P1-K1-D2
atcaggaaggatttgtatgggaacatcgtgcttagtggtggatcgacgatgttcccgggcattgctgaccgtatgagcaaggagatcactgcactggctcctagcagcatgaagattaaggtggttgccccaccagagaggaagtacagtgtctggattggagggtcaatcttagcttccttgagcactttccaacagatgtggatatcgaaggcggagttcgatgaatctggtccagccatcgtccacaggaagtgcttctaaggtgtttcttctggtcattggttttgtggtgtatttcgtctatatactatggtgttttgttatctagtatggtaggtggcttgttgaggatattgcttggtttgcaatttgttttttgatggttatgtgacactttgttatttacagtcatactagctgatctatgcatgcgagtag

SEQ ID NO: 92 - DNA, 439 bp, Lilium asiatic
  Clone ID: LIB3229-002-P1-K1-D5
gcaaggcttgggatgatcagtggatcttctgggttggttcattcatcggagccgccatcgcggcaggttaccaccagtacatcctccgggccggggcgatcaaggcgctcggatccttccggagcaacgcataagtcgctcgttcagcttgctcgatagtcgtcttcatctcaggtcagggtgttttgtgaaggaataagggctaggaaccaccatgtgctcaatgaggagaattgtagatatcatagggctgggctttgctttgcttgccttattattgttcagcaccatttatttcatgtgtttcagttgggtgctaatgggcagtgttcttagtgtgcccctttatgtattgcattccactttcacttctacttcttgtatgtgttgtatgtagttgtcaaatttccgaaacatgtacttgtacaagagttcctac

SEQ ID NO: 93 - DNA, 245 bp, Lilium asiatic
  Clone ID: LIB3229-002-P1-K1-D7
atgactcttggtctaaacctagaccgcattttgctgttctagaggacccaagcccacgtgcgcgcgcattcgcacggatagggctggcctaattcctaccaaaatcaatacaatggccgttgcctcaccacataggaactacaaaaaccctatcggtaccccactttatcctcacttgagctcttcccatcacatctggctactctattccgaatttgcttaatctggtccagctctccaacaca

SEQ ID NO: 94 - DNA, 445 bp, Lilium asiatic
  Clone ID: LIB3229-002-P1-K1-D9
ggacaggctatagtacctttccatccaaactggcttgcagcatcaatgagcaccgggaaagcaagagcagctgagatatccaagccagacatcatcaagatctgtcaaactgataaagttttatatgaggttcagaaggcttgtggtggggaaaaccctgatccagtacaagtcgaaagggccaagatgctcctcagagaacatgaaagagctcttattgaagcgattggaaagcttgctgatatgacagaggatgactctccagatcagaggcggcaccagtactcaggtggagagcagctaaggaacacacatggggtccgaatcgctactcacaagaagcttgagaggacgagatgctactacaatggctatgctaaagatcagcctggtgcattgattccggtcgtcgatctcccagatgaggagtatgatggaggtcgct

SEQ ID NO: 95 - DNA, 405 bp, Lilium asiatic
  Clone ID: LIB3229-002-P1-K1-E10
cccacgcgtccggtttggcctctgtggctttctcctataccatgcccgagaaaaaggtggggaataggttatgaaattgatcgacctccgggataaaaattctcgaccatagggagaggaagatagaaggagctcgactagagggacgtagagaaggaagaggatgctcatgatgagctttagatggaaggcagatggactgtttcagtagcagattttgttgacagataatctgggtagtcagtctctctgagttttaattatctttgtagtcgttttctgttggaggaaaaacttttgcaccataccagacttttattgtggcttcaaagttgggccaattttagacccttaatgaaatttgtgtttttagagaatgaaataaatatgacgagttttcatagt

SEQ ID NO: 96 - DNA, 429 bp, Lilium asiatic
  Clone ID: LIB3229-002-P1-K1-E11
gaaaccggtaggggaagtgctctgaggctttgtttttaccatgcccaataaaaacgtggggagtgtggacatgtaattgatcggccggcggtataaaaattctcgaccatatggagaggaagatagaaggagctcgactagagggacgtagagaaggaagaggatgctcatgatgagctttagatggaaggcagatggactgtttcagtagcagattttgttgacagataatctgggtagtcagtctctctgagttttaattatctttgtagtcgttttctgttggaggaaaaacttttgcaccataccagacttttattgtggcttcaaagttgggccatatttatacccttaatgaaatttgagtttttagagaatgaaataaatatgacgaggtttcattggcattaatataatatttatatttat

SEQ ID NO: 97 - DNA, 265 bp, Lilium asiatic
  Clone ID: LIB3229-002-P1-K1-E2
tcgtgacgggcggcgtttaggatccaagctactcgctgctgcgagctacttttatggcacctaaattaattactggcgcgttacacgctgctggaaaaccctgcgtccactaatcgctgagaatccctttgcgtgggatagcaaaggccgaccgtcgcttccaacagtggcagctgaggaaggacccctgacggcattacgcgcgtgggggtcccagggccgtcactgaggctacgccgtctttgtttttcttctttgcacgtgc

SEQ ID NO: 98 - DNA, 448 bp, Lilium asiatic
  Clone ID: LIB3229-002-P1-K1-E3
cggacgcgtgggcggacgcgtggggtcgggaggactgggatggagacgctaaccaatgaggccggtgaaatcacaagtcatttgcaagggatgttctcgcggactattagattgctggaggctgggatgaagccagtatatgtgttcgacggacagccacctgatttgaaaaagcaagagctcacaaaaaggtactcgagaagggaggatgctactaaggagctcaacacagcaatagaggccggagataaggacgccattgagaaattcagcaaaagaaccgtgaaggttaccaagcagcacaatgatgactgcaagcgactactaagactgatgggtgtgcctgtagttgaggcaccttttgaagcagaagcacagtgtgcagcactttgcaaaaatgaccaggtatatgccgtggcctcggaagatatggattcactaacatttg

SEQ ID NO: 99 - DNA, 349 bp, Lilium asiatic
  Clone ID: LIB3229-002-P1-K1-E4
gttcctttcagtgggtggcagaagatagactccattttgtttacggcagggaatttgagaaacagaccaagggagaagattgtgttgtgggatgagctacttactgctgcatatgagtagtgtggcggggaaaaaaaatctattcttcaagtcataaaatagtgatttgttagaggagagctcacataatggtgctccatatggaagatgctactcattgagtcaactcatcattttaggccggaaatatggacaccattatcaaattcactatagaagccggcaggttaccaacgctgccattgatgactgcctgcgacttctaatactgaagggtgtgcctgtagtt

SEQ ID NO: 100 - DNA, 333 bp, Lilium asiatic
  unsure (1)..(333): unsure at all n locations
  Clone ID: LIB3229-002-P1-K1-E5
ggggacgcccaggcggacgcgngggaccgacaggacggggttggcgacgctgaccaaagaggccgggggagagcacaagtaaagtgcaagggagggagccacggacgactagaaggccggaggcggggacgaaaccagtatatgtgcacgacggacaaacaccggatttgaaaaagcaagagctcacaaaaaggggcacgagaagggaggacgccactaaggagctcaacacagcaatagaggccggaaataaggacgccatggagaaatacaccaaaagaaccgagaaggcgaccaagcaacacagtgaaaaccgcaagccgacacgaagac

SEQ ID NO: 101 - DNA, 128 bp, Lilium asiatic
  Clone ID: LIB3229-002-P1-K1-E7
cccacgcatccgatgaaatatagacattgttttcctactttcccaactgcaacacacgcgggcatgagatttttcgcaggggccggtgctccaatatctacccttgttatttcattactacccctctt

SEQ ID NO: 102 - DNA, 293 bp, Lilium asiatic
  Clone ID: LIB3229-002-P1-K1-E8
gaatgcttccgatgcaacgctcctcgagactccgttactgaagtctgaggtgaacaagacataaactcagatcagatgatacagtagtattactctgaagcttttactagtttttgtcccgccatatcacaactatctttctttatgtactggtttcgaagactgaatgcccatctctcatgtatgtgagagagtcctttctcatcattttggtctgctttaatgtgtaaccctagtttatgttgctacaactgttaaactattatatgaaagtatctgtgtgtgtttttatg

SEQ ID NO: 103 - DNA, 382 bp, Lilium asiatic
  Clone ID: LIB3229-002-P1-K1-E9
gccgctcttcgcccctgctgctgccgccgccggtggttctcaccctcttcgtctccggcaaagatggatcgtgaaaggctcatgaagatggctggtgcagttcgcactggtgggaagggaagcgtgcgcaggaagaagaaggcagtccacaagaacactactacagatgacaaaaggcttcagagcacccttaaaaggataggggtaaatgctattcctgcaattgaagaagtgaacattttcaaagatgatgttgtcatccaatttctgaatcccaaagtgcaagcttctattgctgccaatacttgggtggtcagcggcttcccccagacaaagagacttcaggatttactgccttcaatattcaaccaaacttggtcct

SEQ ID NO: 104 - DNA, 269 bp, Lilium asiatic
  Clone ID: LIB3229-002-P1-K1-F1
aggatgacccaggtgggggccaccattcgggggggcagggtcttaaacaaaatacttataaagagaaagacttaccgccagtaacgtattccttttcatactaaagaacccccacatcattacatttccacaagggtcaggcagtttcaaaaattccaaaacatgggataaaggaaaaaaaatcacaaattgttcattaccactaacttaacattaaaaccccacctgtcttattaccccctcttccacggtatttcttacaaaaacaa

SEQ ID NO: 105 - DNA, 325 bp, Lilium asiatic
  Clone ID: LIB3229-002-P1-K1-F10
caaaacttcaggtggtcatagctatgtggtcctgttttccatctaaacgtctaaacatccgtttaatcggtttttagggatgaaccgatcaagcattctaataatatatgggattttactgtatgcatatatatatatatataaaaaaaaaggcaacccagtgcacgtggctcccaccaatgtggggtactggggagggtcagatgtacacagccttacccctgcatgcagagaggctctttccgaattttatgcatatataataagaaaaaaaatcataaaaatcagaaataataattaatatcaatacaaatctacatagata

SEQ ID NO: 106 - DNA, 430 bp, Lilium asiatic
  Clone ID: LIB3229-002-P1-K1-F11
gcaacacgtgcctgatctacgctgagacccgatgttttcttacgatatgactacagaacggattgcgatattccgggacctaaactgagcacgcgcgccaaaagacggtgacggctatggatgtggtgcatgctatcaagctccaggaacgcacgctctatggcaccaggggctgaactaaccagctgacactgatgccaacgtagttcacgatggaccatctacctgtggtgaggctggttcctctcgatgcttcatcaatcatagggaccttattcttcgacctatcaaaaacaggctgtggtgccacaatcttccagaattccttgttaaaagccattagcaaatctttcatgccagtgcgtacaaaacaacttaaggtctgcaattgttcgttagaaatgccagaacgtactacagggatgcttgc

SEQ ID NO: 107 - DNA, 408 bp, Lilium asiatic
  Clone ID: LIB3229-002-P1-K1-F12
ttctcttaaatctccgaatcaaattgttaattacttgaaaagttacacttaatatgtagtacgaattttacagattcagcataaaaccacattgtatagtttataaataaaacttcattattaaacaaatatagggaacatattgtaactcaggaaatttcatgaatcgtagctcaattccgagttctacatgattgagctgcattgcctccgactgttgataatcacagcaaattatccaagttggagtgcagtctgttgttggcaggaatagtgttgatttggatcgacaatatttacttgtaggaaattccgtgaatcgaagtgtggcataacttcatactcgcttgtggagggcatcatgttcatttgttgttgctggtctctttcattttcagcaaccttatt

SEQ ID NO: 108 - DNA, 385 bp, Lilium asiatic
  Clone ID: LIB3229-002-P1-K1-F4
gactcgtggaaaagcacctgcggcatcgggggttgtttatgagcctcaggagcctacttaccacagagcaatgtgacggtgatgtacggaggctctagcctctatcttaagcaccaactgaaccccaacttgaagcggaccggccacaagatcctggacgggaaactcatcggtcacaagggcgcccaggggtacccctacgacgtcaagaacgaagatcccatggtcaaagctcgagaagagaaggagcggctggctaagcttgaaatgttgaagcgtcggggcatgggttcaccaaagaatggacagggaatgcctgcgatttagcgcaacacataaacagcaaaaatgccattgctcctggaacatttttaatgtagcggat

SEQ ID NO: 109 - DNA, 358 bp, Lilium asiatic
  Clone ID: LIB3229-002-P1-K1-F5
accacgcgtccgacttaatcaaaagtctattctcgaagccaaagattatgtttttgaagtcatcagcctaggactcattcgaaatgttttgctgataggtgggggatcttactatccatatcagaacaactctatggaggactcatactagactacattctaacatgttcccgtaaagaacgtgcgcctctatggagcttattattcaacctcagcagctaaaatctccgcatcattgtaaaatgaacctttatagtagatcttgcttccaacaaaggtgattttctcatcccgcatcacagatatcatacatgctctaaagggttgtcacacacactatgtgttgatatttaacagt

SEQ ID NO: 110 - DNA, 458 bp, Lilium asiatic
  unsure (1)..(458): unsure at all n locations
  Clone ID: LIB3229-002-P1-K1-F6
gaagcggattttcaccagcgacttcgcgctcttgaagccgtatttccacggttcgacgatccgcaccggcgcgccgttctggttcggcagcacctgcccgtagacgcccatcgtcagcagcgtcagcggattcatcgcctcgtccatccgcagcccctccgagtacggccagtcgagcacgggcgtggagaggcccggcatctgcgacggatcggccagcgtgacgaactgcacgtatttcgcgttgccggtcggctgcacgcgcttgatcagctcggacagcggcacgccgatccacgggatcaccatcgaccatccctcgacgcagcgcagccggtacacgcgctcctcgagcggtgcgagcttcagcagttcgtcgagatcgaacaccttcgggtgcagcacctngccctcgacgctcacccgccacgggcgcggccgctctagaggatccaagc

SEQ ID NO: 111 - DNA, 345 bp, Lilium asiatic
  Clone ID: LIB3229-002-P1-K1-F8
cgactgcacgaggtggagcaacgatcaacaggcactatgcttccagtgcgactcatgcaaggctggagttctcgccagcatcaggcacagttggagaaaggtctctgtgatcaacatcgtggtactcatcatcctcgtaattatctatgttgttggatgtgctgctttcaggaataatcggaggatcgacaatgatgagcctttcggagaagctaggatgacgaaatctcggcctagcaggcttcagttttagatgggaattggtggttgttgatatacagtttgtatactaaacgtcagtaggttgtgtgtattatcctggttttgacattccttttcagtttt

SEQ ID NO: 112 - DNA, 320 bp, Lilium asiatic
  Clone ID: LIB3229-002-P1-K1-G1
caatcttttcgacaatgacgaacgcgatatttggcgtgcagtacaggcacacatctgggaagttagagttgaacgatctcgtgtgccacggtctgagtatatgaaaaaatatagagaacgtaaattgagagaattttatggtaacgcttcagaatataccgctgagcaacacagtgagatagatagaatgttcccaggtttgatttggcgcgagcccgatattttggatgggtatgcactctcgcatccggtttacaatttagtatatcgagcacgtgaagagggttatgtgatgaatgaagacctcaaagtggaaattt

SEQ ID NO: 113 - DNA, 185 bp, Lilium asiatic
  Clone ID: LIB3229-002-P1-K1-G10
gacaaactagcggggcatgaagctaagacatttgctgatcaacacaaccaaaaaacctgaggcaggaaaaaccaatcgaagggggggagctcaaaacagaatgccatgttgaattctaaaacgaccacagacgacgagatcagtatacaaaggcaacaacctgaccgacataacacactaatgca

SEQ ID NO: 114 - DNA, 424 bp, Lilium asiatic
  Clone ID: LIB3229-002-P1-K1-G12
cccgtcttctcatcctcactgatcccagaactgtccaccagccaatcaaggaggctgcactgggtaacattcccaccattgccttctgtgacactgattccccaatgcgatatgttgatattggaattcctgccaacaacaaagggaagcacagtattggttgtcttttttggttgctggcaagaatggttctgcagatgcgtggtactattcctcttggacacaaatgggatgtgatggttgatttgtttttctatagggatcctgaggaggccaaggaacaagaggaagaggaggttatagctcctgttgactatgctcctgctactggatatacaggcggaatcacaactgaccagtggggtgctgatcctgttgcagcagcccctgagggtgattgggcagcagcccaagctcctcaatt

SEQ ID NO: 115 - DNA, 395 bp, Lilium asiatic
  Clone ID: LIB3229-002-P1-K1-G2
ccaacccgtccgcgtggcctaactggacgacacgtgtctgttgttatcaacacattcaaatggggggtggccaaccgaggggcatctatccgagtaggccgtgacactgagaaggaaggcaaaggttattttgaggaccgtaggccggcttcgaacatggatccctacgtggtcacttcaatgatcgctgagaccacccttctttaggtgtaaacttaagtgttgttctgccatactacgattattcgcgggattgtgtgttagtttgtggaatttgcattcatcggacagaaaaaaaaaacttatgtatgatgttatcccagcttagaatctggctttgtttggattatattttccttttgtcacagaataaatggatattaataatacttatg

SEQ ID NO: 116 - DNA, 428 bp, Lilium asiatic
  Clone ID: LIB3229-002-P1-K1-G4
gcaagagagaatattttggaatttacagtgccatattattttatagtagcaaacctctcttttaggaaaatggaagaatatttgatgcttaaaggaccccaccaaacataagaaaatattagacacccatgaataaggtggtggaatcttaaaggaaataaattgattttgttcaagaataaaatatccagagaagaaatatggaatttggaagcaaaatctagcaatatgtgggatattatgatgaaatgcattagaagaatatcaaatgacatctttatagagttaaagaggaaagtgtgcatctaaagaaatttggtggtggataaagatgtacgagttgtgaaaataaaaaagacgactttaaaatgtggtaaaatgatgtgtgaagaaaatcttaaaacgtacaaagatacatgctaggacgc

SEQ ID NO: 117 - DNA, 302 bp, Lilium asiatic
  Clone ID: LIB3229-002-P1-K1-G5
ccaaacgtactaatagggcgcacaggatgagatttttaattttttatagaaaaattcacaccacaggatgaccaaccattgggctatgaggattggcctcaggcataagtatatattacacgagctagcagctgttcaacttgacatatgcaatcactaggtgcacatctaaagcagcatagaaatcccatgcaggtggtaccggcaccaaaaaaagagccaagggaggaaccaccaccaggtgcagcatgaaccttggtggtaggacgatccgttaggaagatgacaggattctgtgcatg

SEQ ID NO: 118 - DNA, 338 bp, Lilium asiatic
  Clone ID: LIB3229-002-P1-K1-G7
cccacgcgtccgatgaaatataggcattgatttccttagtcgcagttgcaaaatttgaggtcatcaaatattgcgtagggaccctgggttcaatatctacccttgctattgcggtcctacgccactggatgtagggaacacatttacgctgaacttattttgtagttttggtcccatatttggctaccaggttatggtcaacattaagggcatattaagctaactgtgtttgatgcattaaggattcttagaaggaccaggacttaaaagtgattaattaaaatgtttttctgcttccactacgtgaaaaataaaataataaaatgggatgtcgtttt

SEQ ID NO: 119 - DNA, 445 bp, Lilium asiatic
  Clone ID: LIB3229-002-P1-K1-G8
gatgaactttttgcaaatgtcgctatttcaattggtgctcaaattaatcagtttttgggatttattcaagatgttgcatgtgggaggaacttaaaacagtttgccgtggttttggctagcttgtgtgccgctgcggtgataggtagctgttgcaactttctcaccgtcatttacatcggatttgtttgtgctcacactttgccggttttctacgagagatacgaggatcaggttgacgacttcctttataacatgtttgggcagcttcagaatcaataccagaagctggattccagtgtactgagcagaatacccaaggcaaacctcaagtctaagaagtctctctagattcacctgtttctcctggtttatttattcgatggtcgggaaccctctaaactggtccctaatgataagaaagaggatgattatatatatatatata

SEQ ID NO: 120 - DNA, 443 bp, Lilium asiatic
  Clone ID: LIB3229-002-P1-K1-G9
gccaagttagctgggcattattcttagacttcggcaaatctatatcatttaatgtgctgcaactccaggagccaattcaaatgggacagcggatttctggtttccatgttgaatttttaaacgaccatggagtatgggagctgtttacaattggtacaaccgttggatataagaggctattgcagttttatatggtacaaactcagtttctgaggctcatcatcgacgattcccgtgctgatcctctcatttcttatctgggcgtatatttggatcccttttctaacttggatgatgtacgcaaagtgagtacattgtcgtccttaaatgacagccaacctattaagctaccgacgcataaatatcttggcaatgagagcagagcatctatctagggattaattatatgattcttctttggcgagaactgctattccatcaaa

SEQ ID NO: 121 - DNA, 172 bp, Lilium asiatic
  Clone ID: LIB3229-002-P1-K1-H1
aatttcttcatttattttgagaaaaattttatttttcaacccgaaaccatattttcttgagggggtacatttatatgggggagggggcaaattctataacaaaaacaaatttcgttaggtacttgtagatcaacaatgtttaaaatatgctcacacatttgattacaaaaag

SEQ ID NO: 122 - DNA, 419 bp, Lilium asiatic
  Clone ID: LIB3229-002-P1-K1-H10
ggtttgcttgccagttataaatggagttgtgactgagatcaagaataagacatatccaaaaggatccttcttcaatattgatgtgccaacagatgtggcgcatcataaggggtttaaaataacaaaacaaggaacatccaggatgaaaattgagtggaagcaggtagccaccgccagcgcacaaggagttgaaggccagtcaacaatgcatataaatgccgaacctgcaactgatgaaaaagaatatacttcctctctttctcatgattccctttttttccaaagagtgataaagaaatctgaacaagaggaggaaggagtggatacagatatccgagcaattgcagaaggatatatttcaatgacaccattaggtgctctttctcatatcgagattgatgcagtgccagacttaaaaa

SEQ ID NO: 123 - DNA, 398 bp, Lilium asiatic
  unsure (1)..(398): unsure at all n locations
  Clone ID: LIB3229-002-P1-K1-H11
ccacgcgtncgggtttgcttgccagttataaatggagntgttactggatcaagaataagacatatccaaaaggaggcttctttaatattgatgtgcgggcagatgtggcgcatcataaggggtttaaaataacaaaacaaggaacatccaggatgaaaattgagtggaagcaggttgccactttctgcgcacaaggagttgaaggccagtcatcaatgcatataaatgccgaacctgcaactgatgaaaaagaatattcttcctctttttcttatgattccctttttttccaaagagtgattaatataactgaacaagaggaggaaggagtggatacagatattcgcgcaattgcattaaggttattatttaatgacaccattatgtgctctctcttc

SEQ ID NO: 124 - DNA, 83 bp, Lilium asiatic
  Clone ID: LIB3229-002-P1-K1-H2
tcttcccctaattacttgtgttggatggaacaagtttttattctattattaaatattgcattaaaagaagggtccctatttca

SEQ ID NO: 125 - DNA, 261 bp, Lilium asiatic
  Clone ID: LIB3229-002-P1-K1-H3
gacgcgagcttctaggtggaatgctatatagctgattgctttatgacacatgttgcgaaccttgctgcaagaccagttattgtcgctaaaagcctgtgcccataggtgtaaaggatggaggatggaggtggggtgaaatgtccgaaacgctggctcactgcttgtatgatgtgactattgacatattacagctcgccggcttttaagagatgggacccacaacacttcaatgcaataatatgctacatctttgcattgtta

SEQ ID NO: 126 - DNA, 447 bp, Lilium asiatic
  Clone ID: LIB3229-002-P1-K1-H7
cggacgcgtgggcttttggagcctaggatatcagttttaaacaacccttaaaatgatgcagagagaatggtatatttgggaggagcgaaaggctaaaatcatgagcccatccaacccctaaacttttgacttggtgagaaccattacaatcctgcctaaaatttggcaatcacagctattccagttctgggattgccccgaatagtaaaagatcattgaggacagatagttgagcataattacctgctgcgactaaaaaacacccttgtaaggggatacttctttatctaactgtcatcatgagttacgaagtgacacattcaacaggtgttttcaactatttaagttcttgtgattggtcaggagttaattggtgacaaatttatatgtatctttatactatagaccttgtcatgtattttatgatgagttatgaagtgacacatt

SEQ ID NO: 127 - DNA, 434 bp, Lilium asiatic
  unsure (1)..(434): unsure at all n locations
  Clone ID: LIB3229-002-P1-K1-H9
ctngnccgngggctccangaaggcgccaaggncatcgaaaagcangcngcacagcncngngnncgggccgagganggcaaccagcccgactatgtaaagttggtaaaagcactttgtgctgatcacaatgtccatttggttactgtgccgagcgccaaatctcttggggaatgggcagggctctgcaagtttgattccgatggaaaggcgaggaaggtggtgggatgctcatgcttagttgtgaaggattatggtgaagaatctgagggtcttcacatagttcaggagtatgtcaagtctcactaaagagtaaaccttctaaaataatgcacaatggtttaatttgggagtgatgatgttgccatcattagaatctatttggtnggaccatgtttaaaaccctgaggcgcaaaaactgatctgagaccagtttt

SEQ ID NO: 128 - DNA, 336 bp, Lilium asiatic
  unsure (1)..(336): unsure at all n locations
  Clone ID: LIB3229-003-P1-K1-A1
cccacgcgtccgcaaacttcaatgataagtttgatgaggtccggaagaagtggggaggtggcatcatgggatctaaatctcaggcaaaaaccaaagccaaggagaggctccttcagaaggaaattgctcaaaggatgagctaggtttcttgtttttgtctattatgtcttcttctgtagtcacctagagtgttttttgatatctgtggtacttatgttaagcgaatatgtttcttctttttgtggattattctccttgaacatcatttggaactggatgtcaggttttcatttgtgataatgattgttgctaaatntaaggtattatctngtttaa

SEQ ID NO: 129 - DNA, 142 bp, Lilium asiatic
  Clone ID: LIB3229-003-P1-K1-A10
atcgtgttctgtcctttgaggaatgaaaccctgaaagtgttatttctggcgtctatttgtttgctttgctctatttttatgttgactcacaattggtaattactgttcttgaaatgaatattaaattgttagttgctttcaa

SEQ ID NO: 130 - DNA, 423 bp, Lilium asiatic
  Clone ID: LIB3229-003-P1-K1-A11
cggacgcgtgggctcatcaatcatgtctgggcgaggaaagggagggaagggtctcggcaaaggcggcgccaagcgccaccgcaaggtgctgcgggacaacatccagggcatcaccaagccggccatccgccgcctggctcgccggggcggagtgaagaggatcaacgaccttatctacgaggagaccagaggcatgctgaagatctttctggagaacgtcatccgcgattccgtgacctacactgagcacgcgcggcgcaagacggtgacggcgatggatgtggtgtatgctctcaagcgccagggccgcaccctctatggcttcgggggttgatctagtactgttctcttctgggtttggtggtctatatctgatttgggttgtttcatatttctgatatgaaatgaaatctccgcttgaat

SEQ ID NO: 131 - DNA, 433 bp, Lilium asiatic
  Clone ID: LIB3229-003-P1-K1-A2
cgcgggtggcggcgacgcccttgttccacatcctccgccgccccttctctgacgaggtcaagggctccttcctcgacaagtccgaggtcgcggatcgggtcatcaccgtcgttaagaacttccagaagatcgatccctctaaggtcacacctaaagctcattttcagaatgaccttggcctggacagtttagacaccgtggagattgtgatggccctggaagaagagtttgggtttgagatccctgataacgaagcagacaagataaactccattgagctcgctgtcgatttcattgcttctcacccccaggctaaatgaaacaaatgataaattcaaatattgctcttcattcatccttggcagttgattctgggaacaagagcattgagtttgcagtttgttttagctgttaaacttgtgacctctttaat

SEQ ID NO: 132 - DNA, 436 bp, Lilium asiatic
  Clone ID: LIB3229-003-P1-K1-A3
cgcgggtggcggcgataacgcttgttccacatccttccctgcattgaatggcacgcggactgggatggctttctgtgttagcactgtctatgtgtctgttgttgatctcactgtaagaactgagaaggctgctacaccctctaaggttacacgttactattaaggaaggaatgaccttggcctggacagtttatacaccgtggagattgtgatggccctggaagaagagtttgggtttgagatccctgataacgaagcagacaagataaactccattgagctcgctgtcgatttcattgaagctgatggcatggctaaatgaaacaaatgataaattcaaatattgcgttgatctacttcgccacattgattttcggaacaagagcattgagctcgcagtttgttttaactgttaaacttgtgacctctttaatga

SEQ ID NO: 133 - DNA, 432 bp, Lilium asiatic
  Clone ID: LIB3229-003-P1-K1-A5
cggacgcgtgggcggacgcgtgggggcgaactctcggcaaagatgcagatcttcgtgaaaaccctaacggggaagacgatcactctcgaggtcgagagcagcgacaccatcgacaacgttaagaccaagatccaggacaaggaagggatcccgccggaccagcagcgcctgatcttcgccggcaagcagctcgaggatggccgaaccctagcagattacaacatccagaaagagtcgacattgcatctggtgctgaggttgaggggagggatcatcgagccctcgttgatggcgcttgcgaggaagtacaatcaggagaagatgatttgcaggaagtgctatgccaggcttcatcccagggcagtgaactgccgtaagaagaagtgtggccacagcaaccagttgaggccaaagaaaaagattaagtagatg

SEQ ID NO: 134 - DNA, 370 bp, Lilium asiatic
  Clone ID: LIB3229-003-P1-K1-A6
cccacgcgtccgcttgactgccgttccatgtgctgtttctagcgtctgccactcggtctatggtagtgttttaacacgaatactcacatgtatgccagcatcaacaccattgacagcataacgaccaggacccatgacagggaacgaatccttgctggacagcacatcctgatctctgtcgttaagcagctctaggatggccgaaccctagcatataacatcatccacaaagagtcaacattgcatctggtgctgaggttgaggggagggatcatcgagccctcgttgatggcgcttgcgaggaagtacaatcaggagaagatgatttgcaggaagtgctatgtcaggcttcattctagggcagtgaact

SEQ ID NO: 135 - DNA, 416 bp, Lilium asiatic
  Clone ID: LIB3229-003-P1-K1-A7
cggacagctcagtttatcgattcagagcgcgtgtatggctgaaatcgaggtgaaaacagcctgatttgattttcgtttccctacaataaatcaaacaagacactgtttaactcgctatgtggagcatcacaagtgtgtctatgcaaaaggtgaagagtctggtgattgtgtaaagttagcccaatactaccgatcactctgtcctggcgaatgggttgagaaatggaatgagcagagggagaacggaaactttgcaggccctttttaattgatggatccattagaactctattgtttgctgttgttggtcacataaatgccttactgaatttattctatcattggcttatatggaactgcggtttctgtacctgtaataatttgcggttatggccgtttctgctactgaaataatg

SEQ ID NO: 136 - DNA, 423 bp, Lilium asiatic
  Clone ID: LIB3229-003-P1-K1-A8
ggtgcggctaaggctgtcggcaaagttctccctgcattgaatggcaagctaactggaatggctttccgtgttcccactgtcgatgtgtctgttgttgatctcactgttaggcttgagaaggctgctacatatgatcagatcaaggctgctattaaggaagagtcagagggaaaactgaaaggaattcttggttatactgatgaggatttggtgtccactgactttgtgggtgacagcaggtcgagcatttttgatgctaaggctgggattgctttgaatgataacttcgtgaagctggtggcatggtatgacaatgaatggggctacagcactcgtgtggttgatctcctccgccacatggctgcgaccaagtaggtggatgtccttaaccaagtttggtggatgtcctttttatggtgatgt

SEQ ID NO: 137 - DNA, 306 bp, Lilium asiatic
  Clone ID: LIB3229-003-P1-K1-B1
tgaagatcgatggtgatgagagcacagtgaaccttccggtggagaaggcccttactgaggagatgaaggttggtagtgatgagagcacggtgagccttccggtgtgaatgttggttaggagagatgatgatcatatttcaatcaaagagatgaagagttcctctgcatcttttgtcatgttttttagataagatgtatacaacttgcgcctacggcgtggccggagctattgtattagtgtaagttgttgcttcaagtgttgtactgaatcttagtttttagtgaattcaaaagcctttcctcttc

SEQ ID NO: 138 - DNA, 434 bp, Lilium asiatic
  Clone ID: LIB3229-003-P1-K1-B2
cccacgcgtccgcccacgcgtccgcccacgcgtccgcggacgcgtgggctttttgatgcatttgggaaccaaagtcctgatgtccgcaagagcgttgtattctgcttggtggacatttatattatgctaggcaaatcattcttaccatatttagagagcctcagtagcactcagttgaggctggttactatttatgccaatcggatatcacaggcgagaacaggtgctccaatcggataaattttttattcacttttcttttcctcgggtgtctattcttccgtgtgtatttgtatattgtgtggaaatgtcacatttttttatatggtaaagagtaatttgagtgtgatttagtttgccagggttctatacactagtgtgttgagaagctattgattgtggtttcggttgtaaatctctcattcttgttcaaa

SEQ ID NO: 139 - DNA, 430 bp, Lilium asiatic
  Clone ID: LIB3229-003-P1-K1-B3
cccacgcgtccgcccacgcgtccgcccacgcgtccgcggacgcgtgggctttttgatgcatttgggaaccaaagtcctgatgtccgcaagagcgttgtattctgcttggtggacatttatattatgctaggcaaatcattcttaccatatttagagagcctcagtagcactcagttgaggctggttactatttatgccaatcggatatcacaggcgagaacaggtgctccaatcggataaattttttattcacttttcttttcctcgggtgtctattcttccgtgtgtatttgtatattgtgtggaaatgtcacatttttttatatggtaaagagtaatttgagtgtgatttagtttgccagggttctatacactagagtgtcgagaagctattgatggtggtttcggttgtaaatctctcattcttgtt

SEQ ID NO: 140 - DNA, 423 bp, Lilium asiatic
  Clone ID: LIB3229-003-P1-K1-B6
cggacgcgtgggtgagagggatgatgattgtctagctgattggacatggcggcaattgcaaaacggtggtaagataaccgatatcatcgatgaggaaatcaaggacccgatgtacatggacgagattgaggtggttcttaagatgggactcatgtgtaccagtgcgctgccttctgacaggcctactatgaaggaggtgctgcaggtcttgctaaggtgcaatccgtccaacactgagacaacaaattacaagcgggaagacagctatcgtgatgtggttactcttctacagcccaaaagagggagttaaaaagtgaaaccgtcagagaaccaacatgacgatttctgttatgatttggaaaagggttcaagtgggagaactctctcaagagaagtatgcacgctttggttcttctaaaaggt

SEQ ID NO: 141 - DNA, 397 bp, Lilium asiatic
  Clone ID: LIB3229-003-P1-K1-B7
cggacgcgtgggtggaagtccgtctgagagaaggtcgagctgtgaacgtgcacatgttttgtaaccgtaaacctggtctcttgatctcgacgatgagggcactagataaccttgggctcgacatccagcaggccgtaatcagctgtttcaacggatttgcgcttgatgtttttcgagctgagcagtcgaaggatggcccgaacgcgctccctgaggaaattaaggcagtactcttgcaagcagcaagatttcatagcatgtagtcgaagatggtaggtaaatgattgtaattggttttaacatttgttagggtggacatcatggctggtgaagctgtatgtttaactttctgtgagcaaattggcgccttgtggaataaatattttatattgggctt

SEQ ID NO: 142 - DNA, 430 bp, Lilium asiatic
  Clone ID: LIB3229-003-P1-K1-B9
agattgcatcccccatgtcagggaaatttttttaatgtccctcctgggtacaaattgacccaaacatcacttattacatcaagaaacatactcttgttggaatgtctgctgtccagattctcttgggctggaattctctttctgatcacattcattatttccctgattagctgaacgtgaaagcttttaactgaaaaattccatcatttgtaactttccacttaagtctatctacgattctgctccctctcccattccaatctccaccggtaaccagaataattatcccatctttgtatgttccgtatcagataaaaccattccaatgtgcaaattccatgtaatcttgttatcagttatagttttgaattcacttaccaaacctttttttttcttttcttatatgatgaatttgtgggaacttgacagc

SEQ ID NO: 143 - DNA, 436 bp, Lilium asiatic
  Clone ID: LIB3229-003-P1-K1-C1
gtcatcttcggcactgctaaatggtgggtggtatggcctacattgaacctagtcgcctctaacaccacagcaccgccgttagaaggtaatgaagaagcaaccctattatcagtaatgtctgaacctactaatgtaccggacaccttggaaagcctagaaactagtgaatctctcccttgggaacataatgttctgtacacttgggaaaccctaaaaactggtgaatccctcacttgggagacgtacagatgcacgatgcaaactgactgcaactttgcttgctggaatggtactgtacttatctggtctaccggtacctccggcaaaggcagtggatgctacctaaagtttcagagggatgcaaagttcgacatctacaacagtgccaatggtcttgtgtggcggctcccatttcgctggccggaagcaagttaca

SEQ ID NO: 144 - DNA, 421 bp, Lilium asiatic
  Clone ID: LIB3229-003-P1-K1-C10
ctacacctggttttttcagcatttggatttgttcacaagattgcgacctttgaaaaaactgccgggtttcaggcactggttcaattttctgactcagttactgcgtcgactgcaaaagatgccttggatgggaggagcattcctagatacttgcttcaagagcatattgggccttgttccctaaagataaacttttcggctcatactgatttgaatgtgaaatttcaaagccacaggagcagagattacactaatccttaccttcctgttgctccctcagcaattgatggcagtgggcaaattggtattggccaggatggtacgaaacaagagcccgagagcaatgttctccttgcatctattgaaaacatgcaatatagcgtgacaattgatgtgcttcatacggtattttctaattttg

SEQ ID NO: 145 - DNA, 417 bp, Lilium asiatic
  Clone ID: LIB3229-003-P1-K1-C11
ctacacctggttttttcagcatttggatttgttcacaagattgcgacctttgaaaaaactgccgggttttaggcactggttcaattttctgactcagttactgcgtcgactgcaaaagatgccttggatgggaggagcattcctagatacttgcttcaagagcatattgggccttgttccctaaagataaacttttcggctcatactgatttgaatgtgaaatttcaaagccacaggagcagagattacactaatccttaccttcctgttgctccctcagcaattgatggcagtgggcaaattggtattggccaggatggtacgaaacaagagcccgagagcaatgttctccttgcatctattgaaaacatgcaatatagcgtgacaattgatgtgcttcatacggtattttctaat

SEQ ID NO: 146 - DNA, 421 bp, Lilium asiatic
  Clone ID: LIB3229-003-P1-K1-C12
gcttcaccagtgatcggccaccttcggtgaccggaacccaatctgagtgatcaaacctccttaaaagccatatttagactcgcgcctctctcctatgcatttccccctcgtcaatttcaagatctatcgtcgggtttgcgatatctcattacttccggtcaccgattggatctccggtcatccacttccgatcaacacagtttcagagcagattctaacccttttacattccttatatctctgatctaaatgattttttaattggattcattggtttccttttcaggttcattggggtggatgaatctagagattatcagagcaatataggtgattccggagactttgataaggggggagaagggctagaaacatctagatgtgtcgggattttggatggaaggatcgtgaggagggaggg

SEQ ID NO: 147 - DNA, 346 bp, Lilium asiatic
  Clone ID: LIB3229-003-P1-K1-C2
cccacgcgtccgcaggatttactggaccaacctaatcctgcggatccagcacagaccgagggctatcagctctttgtccaggatccagtagagtacaagagacgggttctactgcagaccaagcagtacccacctactatctaatgtcacctgctgttaggtctggcacctaaaaactagcaaagtctcggttgttagagcatctgtatggtcaagtaatttggtggttcgacatctttaaaatgacttgtgcattgtagtagtgtcttttgaactgtttcaggagtctaaatactcttgataagaattatggtgttaatcggtttttctttgtttatgcgttttc

SEQ ID NO: 148 - DNA, 317 bp, Lilium asiatic
  Clone ID: LIB3229-003-P1-K1-C3
cccacgcgtccgaaggatttactggaccaacttaatgattgcggatccagcacagacgcgagggctatcaactatttgtgcaggatccagtagagtacaagagacgggttctactgcagaccaagcagtacccacctactatctaatgtcacctgctgttaggtctggcacctaaaaactagcaaagtctcggttgttagagcatctgaatggccaagtaatggggtggttcgacatttgtaaaatgacttgtgcattagagaagtgtattttgaactgtttcaggagttgaaatacttttgataagaattatcgtg

SEQ ID NO: 149 - DNA, 266 bp, Lilium asiatic
  unsure (1)..(266): unsure at all n locations
  Clone ID: LIB3229-003-P1-K1-C4
cggacgcgtgggcagaatgctcctgcagattatatgcgttaagggttttggctttgtaaaagtttattagcggggatgattacatggtgtggtctgtgtgttgaacatactgaggtatattgctttgcattggtgtcgtgtggtaatcgcaataagattggaagtctggaactgtttatttatactaactgttctcttactgaaatgattgtaacatctttttttttttttttttttaatgttttaatactggctttgttnnanna

SEQ ID NO: 150 - DNA, 361 bp, Lilium asiatic
  Clone ID: LIB3229-003-P1-K1-C5
aaattaatggatgcttcaaggaatagtttttgtgctgatcaattcttggaaccttctcagtatgcattctccccacctacatctgctgggaaggcatttgcgtgcagctacaacaacatgaaatcatttttggtttacaggggagaagacatttaggctcctcttgacttttttattccatgattttgcacttgtcgattaaaatactcagaaggcttagttgagaaaccgtttgtgcatctttacagactcagaagggttagttgagaaaacctttgtgcatctttacagttatttcatctcttattgtaagcaaatagtacttgtgatcttggtagagggtgaaaatttcatcttggga

SEQ ID NO: 151 - DNA, 421 bp, Lilium asiatic
  Clone ID: LIB3229-003-P1-K1-C6
taagctcgcctccctcatcctcctcctcctcctcctggtcatctcgacggacgcccagagtgtctgcaacatgagcgaggatgagctgagcacctgcaagccggctgtcgcaatggttgatccagtcccactgccgtcggacctctgctgcacagcactctcgcacgcagacctcgactgcctctgcaggtacaagaagtccgggtggctcacctttcttcgaattgacccagaccttgcaatgcagctaccctcaaaatgcaatctcacacctcctccacagtgctgaacttcaactattttacaactctaggagtcttaagtgtgtttgagctgtttattgttcttctaatttctgaatttaaatcttcttccgtgtaattgtgggttcgtggcataatgaatcaatattttcgtgatg

SEQ ID NO: 152 - DNA, 423 bp, Lilium asiatic
  Clone ID: LIB3229-003-P1-K1-C7
caaatataactctccgtgcaggaatggtggagattgcttacacgcgcgagccagagctatcaagggaggagttgatcatgcatgcacgaaggcggagatggagggctctgatgatgtgaaggtacgaggagcagaggatcaagcagaggagatgcacatgcagacggaccggatcgagaaccaggagatcaagcaccgatgattgatggctctgatgaagtgaagttctgatcagacggcgaagagtgaggccgtgcatgaagactctagaagcttgtgtgagaggagatcaccattggttgtgcatgcatggtgctcggagaagaagggatgccaggcagaagacgagatctataaagccctaaggacgagcgatgaagttccccaagtctcagacgaagaaattcactcgttctctgagcc

SEQ ID NO: 153 - DNA, 431 bp, Lilium asiatic
  Clone ID: LIB3229-003-P1-K1-C8
ggcaagtctcaatagaggaaggagaagctaaatcacgagacctcggagttattttcatcgaaacaagtgccaaggctggcttcaacataaaggcacttttccgaaagatcgctgctgctttgcctgggatggagaccctctcctcgacaaagcaagaagatatggtcgatgtgaatctgaagtccggcaatgcatcattgcaatcacagccacagtccggtggatgcagctgttaacacctatgcaaagttctgatacatctgctgctgcgtgagtctcacagctcagctcccatcatactcttaagtagttctagtctctaaattctacagaatatatatattaggagtgtcgaaattgttactatgatggctctacaagtctcctttaatgtaatttgtagaagtttaatcttttccgtatgttaatag

SEQ ID NO: 154 - DNA, 262 bp, Lilium asiatic
  Clone ID: LIB3229-003-P1-K1-D10
ggaggcggtagcagagggagaaactgagattattggagcttaaggcattatctatcttttttactttctcgaccctcatgttttggtagtggtagttctactattgctggaaaatctatagactagtgcaaaacttaatttgcggcagtttggttgcttctttgcttcggcatagtgaaactcattataaatttggaggtagacaatttttgttctagtgtatcttgtctccttggaaattggaatcgaacatttgattaaa

SEQ ID NO: 155 - DNA, 368 bp, Lilium asiatic
  Clone ID: LIB3229-003-P1-K1-D11
cccacgcgtccggagctagtaaggatgacgacagtgatgacgacagtggtgaggacgatgagaggccgccaaaacgataaaatgatggctagcatggaacagatctgggcactagggaattatgctttaggttaactcgtctttctttgtgttgtgggggcatgccttggacctcttacaagaggtaggaactctgatttatggggaagttggtcactccttccccaatggcagaggaatgtacctcttttttctatctttttttccctttccttttttcttgttaatgtgaactgaggtttgtgtatggatggtttctatacctccttaatttgctatgtacaattgaatttcactgttagctttat

SEQ ID NO: 156 - DNA, 338 bp, Lilium asiatic
  Clone ID: LIB3229-003-P1-K1-D2
cgaccaggagctgggcaagctgcttgctggagtcaccatctccaatggcggcgtcatgcccaacatcaacctggtcctgctccccaagaaaacacttgagaagggtgattctgctgcaacaaaatctcccaagaagacttccaagtctacaaagaaagctaccaaaaccccaaagaacgcttaatgtatcttgtgagctccagtaggcggtgaattcgaattagggcatttggattgtaaaattggaagggggagtttgtgattttctgtactgggcggtcagggtttgctgtgtcctggttttagacaatatatccagttgtcttcgtttttctttc

SEQ ID NO: 157 - DNA, 284 bp, Lilium asiatic
  Clone ID: LIB3229-003-P1-K1-D3
cccacgcgtccgcccacgcgtccggcttttgtgaataaaataaaatgaattgggaaatatggagagtcggaggtgtctgctgtgaatctgtgatgttgtttcgccagtctttagcttatgcagttgtctttattcttttctgttgctttagcttatgcaattacctttgttaagacttatgtttaagttcttggaactgagtctctggttcgttgtcgcggtttaactgcaactgctgttcgttggttatttggtaattagtgatgcatatcattgtttggtct

SEQ ID NO: 158 - DNA, 231 bp, Lilium asiatic
  Clone ID: LIB3229-003-P1-K1-D4
cccacgcgtccgcccacgcgtccgcgtcctccccggcgagctcgccaagcatgccgtctctgagggcaccaaggctgtcaccaaattcaccagcgcttagtcttacgaggtgtttaagactgatcgagcgtctgtactttgtagctgctattaatatgtttcgatttctgattgaaacttatgttacttcagtttccctttgttgaatcttgctctataattatttgtctc

SEQ ID NO: 159 - DNA, 401 bp, Lilium asiatic
  Clone ID: LIB3229-003-P1-K1-D5
caccctctacatgggactcccctaccgtagaggcaatccgcccaacacaaatgaaactccaggcccaggctcgatggagaacgtcccccacagccccgtccattactggaccggagacaagagacagaaaaatgcggagaacatgggcaacctctactcggccgcattcgaccccatcttctactcacaccacgccaacatcgaccgcctctgggacgtctggctctctcttgatggaggaaatcgccgcaatttcactgatccagattggctcaactctcagtttctcttctacgacgagaacgcagacgttgtgaaggtcaccatcaaggactgcctggacatgagtaagttgcgttactgctaccagaaggtaagcaatccatggatcaactcacgac

SEQ ID NO: 160 - DNA, 427 bp, Lilium asiatic
  Clone ID: LIB3229-003-P1-K1-D6
caggaagatcgcgcccggatggcgcctaccccctctaagcccaagaaggtctctgttgctgctgagaagaccccatcttatccctctcctgtggacactgtagcaggaggtggggaagtggatcttgtggtgaaagactcaactttggcagagctcttccgtgggaggaagagggtgcatgccgttggtggatctcttgagccgacaaagagagcgagaaagcttggtgacgtgtttgatcagattgctgctgcaaagggcatggagtcggtgagcacagtctcgatccggacacgaagcaggagtccggcagctgtggaggctgatgggttgcctacaaaggaagctccagcttctcgccgggtctctctgaggaagaagtctggttagagagtttgttaccttgtttctatgtttggtttttggt

SEQ ID NO: 161 - DNA, 60 bp, Lilium asiatic
  Clone ID: LIB3229-003-P1-K1-D7
aaaaaaaaaaaaaaaaaaaaaaaaaaaaaaaaaaaaaaaaatggggcagcagcagtcaaa

SEQ ID NO: 162 - DNA, 428 bp, Lilium asiatic
  Clone ID: LIB3229-003-P1-K1-D8
cggcggagcagcagcagcagccatgggtatcgatctagtcgccggcggccggagcaagaaggccaagcgtacatctcctagatccgatgatgtctacctcaagctcctcgtcaagctctacaagttcctggtgcgtaggacggggagcagcttcaatgctgtgatcctgaagcggctcttcatgagcaagacgaacaagccgccgctctcgctcaagcgactcatgaccttcatgaaaggaaaggatgataagattgcggtgattgtggggacggtgactgatgataagagggtggttgaggagatcccggcgatgaaggtgaccgcactgaggtttaccgagactgcgagggcgaggattgttaaggctggtggtgagtgtcttacgtttgaccagcttgccctgcgtgcccctctcggacagaaca

SEQ ID NO: 163 - DNA, 420 bp, Lilium asiatic
  Clone ID: LIB3229-003-P1-K1-E10
gagtggaggagctggtgaggaagagcagggtgcagctgtaccagggggtctatgatctgcatgatggggtggcatcgacggagtcgtgggtgagggagatggagtgggaggggctggagaggtttatggcggcagagaggaaagtgtggaaggtggatggggagagggctgggtatgtgcagaggtatgggagcttgagccaagtggccgtgttgggtgccggccacattgctgctgccgatcagaggaggaatgtgcaggccatgatcgaggactgggtaatggagaagggctactttggcaatgaggctcctgctgagaaagatcatggcttgtcaagatcttactgaatcctactcatctcggcttggatgatgaaaaagtgctttcagaatctggcttatcatttgaataatattg

SEQ ID NO: 164 - DNA, 122 bp, Lilium asiatic
  Clone ID: LIB3229-003-P1-K1-E11
gagtggaggagctggtgaggaagagcagggtgcagctgtaccagggggtctatgatctgcatgatggggtggcatcgacggagtcgtgggtgagggagatggagtgggaggggctggagagg

SEQ ID NO: 165 - DNA, 400 bp, Lilium asiatic
  Clone ID: LIB3229-003-P1-K1-E12
attcatcttcagttgaattgagaaagtgtttgttcggttgacctttactttatgattaattattttgaatcatttgagtcatgtcaatcagtgttctttggattatacgtgtagaactcatattcttgttctatcatcaatgaagtcttgtggaaattttatggcaattgattttggatttgaggtttaacattcagtttcaaaattcataaataactttgaacacatactatgcttgctgggataactttgtgagtaatttgagttttttgaatggtttttgattcaatttataagatcagatacttgcattgtggattgatttaagaacaatttactatgcttagttgattagagaatcatttttaaattgagtttggagtttatgatttgattgact

SEQ ID NO: 166 - DNA, 338 bp, Lilium asiatic
  Clone ID: LIB3229-003-P1-K1-E2
cgaccaggagctgggcaagctgcttgctggagtcaccatctcccatggcggtgtcatccccaacatcaacctggtcctgctccccaagaaaacacttgagaagggtgattctgctgcaacaaaatctcccaagaagactcccaagtctccaaagaaagctaccaaaaccccaaagaaagcttaatgtatcttgtaagctccagtaggcggtgaattcgaattagggcatttggattgtaaaattggaagggggagtttgtgattttctgtactgggcggtcagggtttgctgtgtcctggttttagacaatatatccagttgtcttcgtttttctttc

SEQ ID NO: 167 - DNA, 338 bp, Lilium asiatic
  Clone ID: LIB3229-003-P1-K1-E3
cgaccaggagctgggcaagctgcttgctggagtcaccatctcccatggcggtgtcatccccaacatcaacctggtcctgctccccaagaaaacacttgagaagggtgattctgctgcaacaaaatctcccaagaagactcccaagtctccaaagaaagctaccaaaaccccaaagaaagcttaatgtatcttgtaagctccagtaggcggtgaattcgaattagggcatttggattgtaaaattggaaggcggagcttgtgattttctgtactgggcggtcagggtttgctgtgtcctggttttagacaatatatccagttgtcttcgtttttctttc

SEQ ID NO: 168 - DNA, 337 bp, Lilium asiatic
  Clone ID: LIB3229-003-P1-K1-E4
cgaccaggagctggcaggctgcttgctggagtcaccatctaccatggcggtgtcgtcccgaacatcaacctggttctgctccccaagaaaacacttgagaagggtgattctgctgcaacaaaatctcccaagaagactcccaagtctccaaagaaagctaccaaaaccccaaagaaagcttaatgtatcttgtaagctccagtaggcggtgaattctaattagggcatttggattgtaaaattggaagggggagtttgtgattttttgtactgggcggtcagggtttgctgtgtcctggttttagacaatatattcagtggtcttcgtttttttttc

SEQ ID NO: 169 - DNA, 426 bp, Lilium asiatic
  Clone ID: LIB3229-003-P1-K1-E5
ctccgttcgaagcaaagcagcgatgtcgggtcgaggcaagggcgggaaggggctgggcaagggcggcgccaagcgccaccgcaaggtcctccgggacaacatccagggcatcaccaagccggcgatccgccgcctcgctcgccgcggcggtgtgaagaggatcagtgggctcatctacgaggagacccgcggggtgctcaagatctttcttgagaatgtcatccgcgatgctgtcacctacaccgagcacgcccgccgcaagacggtgacggcgatggatgttgtgtacgcactcaagcgccaggggcgaactctgtacggcttcggcggctgatgggtttggtcttctgcaagctttagtggtgctggtgtctatttccttttgctgtcgactggtaatcctagtgggtcttctgttatgtttcc

SEQ ID NO: 170 - DNA, 421 bp, Lilium asiatic
  Clone ID: LIB3229-003-P1-K1-E6
gccgcggcgatcatcggtcttgagggcggcatctgggcccagagcgcctcctttccccaggtgaagcctgaacaaactgctgcaattatgaaggactttgctgagcctggatctctagcaccaactggcttattcctgggtgatggcaagtacatggtcatccaaggtgagccaggagctgttattcgggggaagaagggctctggaggtgtgaccataaagaaaaccaacatggctttgatcgtcggcatatacgatgagccaatgactcctggtcagtgcaacatggttgtggagaggctcggtgattatctctatgatcagggattttaggtccattttactcgtttttgtgtctacctttggcatgggtttgcatcttatctgttgatgtggttgaaatgctttgaaatggtccttg

SEQ ID NO: 171 - DNA, 308 bp, Lilium asiatic
  Clone ID: LIB3229-003-P1-K1-E7
tccgcctgtctcaatccctgtcagcggcagggtggtagggttctgtggtgtgtctccctcctctccttcttcgtctccggctgatggttcgaggtcaggtgaaagcaacagcagcagcagtagccagttgaggaggatcattaacccttccaatatgtgaaattctactgttgaggtttataattatcatatgagtatataatataattatcgtattagtatataaatgtaagtttataactgttgtgatgagctagtaacaactctctgacttatatcagttcgagattctctgctgcagttaaaaa

SEQ ID NO: 172 - DNA, 388 bp, Lilium asiatic
  Clone ID: LIB3229-003-P1-K1-E8
gaagaccttatccagcttccgtccgacaaggctcttctagaggatccagttttccgtcctctagtggaaaaatatgctgctgatgaggatgctttcttcgcagattatgctgaagctcatctaaagctttctgagctgggatttgcagatgcggatgcgtgaaggttttgatagtctcggttactatatgaaggaagaatgataataataaagctccattgattattagtcgctctgttatcaattctgtgtgggctccattggtagtctcggttactctagtatttgagctatttctcattttgcctagtttttctgattaatgtttttgtgtggtactaagtgtgcaagttaatggagccttactatttctaggtcttgatgtcaa

SEQ ID NO: 173 - DNA, 226 bp, Lilium asiatic
  Clone ID: LIB3229-003-P1-K1-E9
gacgactttatcaatccttcttacgactaggctgataaaccatagccggtgcgccgcatcaatttttgattcgtttcctatgaaccgcaatatctcattgaaaaacaacttcaatattatctaatctttcgtgagcaacaaaaaccaaaaccggatgccatactctattatccaactttacatccatcatcaggctacataatacatataatatatccatatctaa

SEQ ID NO: 174 - DNA, 395 bp, Lilium asiatic
  Clone ID: LIB3229-003-P1-K1-F1
gcagctgcaaactactccggtctgccactaatggcccgcatcaagcagactgtgcgcaagttcactagcagtaaggcctctcggaagcagtttgcaaccaaggcagaccgtatgtctcgttcggcaccggtggaaggtagaagcccaaccggttacgtgccgggacggtggcgctccgtgagatccgaaagtaccagaagagtacagagcttgttatgcacatgcttaccgtccagcgccttgtcctgcagatcgctcaggactgcacgggatgcctcctcttcaaaagctcagccataccagccctgcaataggcgtcggagtcttacttggtggggctagacgaggacaccaacttgagcgccattcaacctaagagggtgacgctcatgccc

SEQ ID NO: 175 - DNA, 290 bp, Lilium asiatic
  Clone ID: LIB3229-003-P1-K1-F10
agaaggcaccctaccaggccatatctgagaagcggaagactgagtacagggtgaagatggatgcttacattatgaagctggacagaaatgcttagggtgaggagtcagacaagtccaagtctgaggttcatgatgaggaggatgaggaagggagtggtgagaatggtggtgatgaggctgatgagtatattgcatgaagaccttcatggtaactcttgctggatgtttctggatttagtgtatttagttgttaataaatgtcgtaatatattgtaaattctacattttta

SEQ ID NO: 176 - DNA, 137 bp, Lilium asiatic
  unsure (1)..(137): unsure at all n locations
  Clone ID: LIB3229-003-P1-K1-F11
gggaaatctgcgtgacatcaacgagaagcatgcctacatggccccagaggaggagcgggaactttcgtgttttaaataacacnacatcaattcacaagagctaccacatgccttacggccaaatcattaccatccac

SEQ ID NO: 177 - DNA, 246 bp, Lilium asiatic
  Clone ID: LIB3229-003-P1-K1-F12
gtccagtgcagtttctgcaccaccattctactggtgagtgtcccatgcagcaatctactgaaggtggtcactgtcaagtgtggccactgcacagggttgctctctgttagccttgtgagggcttcatttggtcccctacagctccatgatgataatgcggatgaaaggaaggatgacgggaaagataaccccccagaaactaccatcgtcaataaacctgcggaaaaaaggcagcgcgctcccttc

SEQ ID NO: 178 - DNA, 88 bp, Lilium asiatic
  Clone ID: LIB3229-003-P1-K1-F2
tccgcgagcggccggtttagagggtccaagcttacctacgcctgcctgccgcgtcatagcttttctattggggcaccttaattcaatt

SEQ ID NO: 179 - DNA, 110 bp, Lilium asiatic
  Clone ID: LIB3229-003-P1-K1-F3
ctctggtaaagtagcaagggaacagtgggtttgtggatttcagaggtgatattgttatttgtagtattgtttaattgtggaatgaaattaatgtgatatgtttgtgatgt

SEQ ID NO: 180 - DNA, 425 bp, Lilium asiatic
  Clone ID: LIB3229-003-P1-K1-F4
cgactctagatataaaccacaacaaaatctatggaagtattcccaagcagattacagaactacaggggctgtacttcctgaatgtgagctacaacaggctctgcggcgagattccgaagctcgggcggtatgatcagtactccttcttccacaacaagtgcctctgtggaccaccgctggccgcctgcaagggccactgattgtaatagtactcagttgttcgttctcttgggtgcaagacctagtgaacttagttgtactcaattgtgcctctcttctggcttctacatctttctgagatgtaaggagcgtaataattgagatggccatctgtccgtctgttgtactattgatctcgtggtttggtccattgttcgcttttgggaccagacattatataaaatattttgccccgatattctacg

SEQ ID NO: 181 - DNA, 371 bp, Lilium asiatic
  Clone ID: LIB3229-003-P1-K1-F5
ggcgaaatccattatatccgtgattcagacgatgagcatcctgattctgacgaggaccctgacgatgatttagagatataaacttacttatcacgcttcatgactgtacagccggggcttttgtcacactaacttcagcgaataggttctctatacctctgtatttaccaatttaatgacaatcggattagggtagtcgtataaagatcgtgtttctatgtggtcagaccatgtttctactgatcatctgaaattatttaatgttgtaggagttcagtctgcataggaaacttgctgttctcctgtattccgatgaggatttgagacggtgacctttttatttgtattgaaagatgatttgataatctaat

SEQ ID NO: 182 - DNA, 284 bp, Lilium asiatic
  Clone ID: LIB3229-003-P1-K1-F6
cccacgcgtccgtataaaaataattaagaacgtatgaacataatgaatatgacgaggacaatggaggtactttaaagttattatcattacggtacacacgtttatgactgctcaatgcccagcttaaggcgcactaacttgtactgctaggatgtcaatacttgtgtatttaacaatatactgaccaatggatggggctagttctagaaagatcaggaatatgatgtttttgaccatgtcacgactgaatatatatatttgtaaagaatagagcgttttttgtt

SEQ ID NO: 183 - DNA, 366 bp, Lilium asiatic
  Clone ID: LIB3229-003-P1-K1-F7
gctatcttgcactgctacactggagaaggcatggatgagatggaattcacggaggctgagagcaacatgaacgatctcgtctccgagtatcagcagtaccaagatgctactgttgatgaggagggcgattatgaggatgaagaggacgaccagcagcaggagatgtgagggaataaatcttctcgtactgatagtaggtatgctgcatggtagagttctgttacctttcccctcttctgccctggctgacattgttagttgtctgtgcgatatttctatgttttacttttcaaatgaactgctgtttgtactgcggttgtactctatgtaagctctgctgatgttggtattattctgaatgccggt

SEQ ID NO: 184 - DNA, 302 bp, Lilium asiatic
  Clone ID: LIB3229-003-P1-K1-F9
ccacgcgtccgctctgatcaacaaatctgcgaaggagtgaactttggtgggtggatctagttgggtgtcttagttatgtgtaggtgtatctgtggttgtgtcctgtttctgttatgggttgttggttgttggttgtgttggatctgatgaattgtggtcgtttaatttgtatggagacttggtttaatggtgctagttggttaaaattgtgaattctcgagtattgttgggtttagatttggtactagtagttgatgtaatctgtggaaaaccatctgggttttgttgaatcaatttcatgg

SEQ ID NO: 185 - DNA, 406 bp, Lilium asiatic
  unsure (1)..(406): unsure at all n locations
  Clone ID: LIB3229-003-P1-K1-G1
gcgacggctcgaggcgcctccgaggtgctcaacaaaggcttgttgaagccactggatcagctgtctaccatttccgcttcctctctcttatcctttttgtcagagaacttgtgcatgttaactgaaacactatgagctatactcccaaaaagttacatgaggagggaaaccggaaaagacctcttgaagagagttgcttttattccactcctggtaagatgatcccaccgccagatgataatttttacctgcctcttgaatctgggcaagatggccgttcatcaaaaatccaacgaagcgatcctcgtgatgttgataggaaatcatctttactgcaccagagaactccctcacctggcaactacttggaccatcgagttgtaagcagatcagagttaattntttt

SEQ ID NO: 186 - DNA, 390 bp, Lilium asiatic
  unsure (1)..(390): unsure at all n locations
  Clone ID: LIB3229-003-P1-K1-G10
gtggggcttaaagaaataacagaggaaaaagtagagctgatggcatgtgatgatggaaaggaaccaaaggatcctttagagaaggagcccaacacaaccaggaaacagaatgagaagctctatgcagtagagggcattctagatcctcggctccgtaaagcagaaaagaagcgcaggaaacgcaacaagttaagctcgatgaatgaaatggacgctgattatgattttaaggttgattttcggatgaaggaagtcgagcctgaaggtgattctgccagcggcgatgatagtgataaagagatgacgaaagaggcgactcaggcgccgatgtctggtgttgaattagatatgtgaataactcanactgttccaagtttattattgttattt

SEQ ID NO: 187 - DNA, 352 bp, Lilium asiatic
  Clone ID: LIB3229-003-P1-K1-G11
gggaaatcgtgcgtgacatcaaggagaagcttgcctacgtggcccttgattatgagcaggagctcgaggccgccaagagcaactcatcaatcgagaagagctaccagatgcctgacggtcaagtcataaccatcggggctgagcgtttcatgcgcgccaaaactctgtaccaaccctacctgatcggcatggaagctattggcatttatgagaccacctacaattcaatgatgaaatgcgatgttgatatcaggaaggatctgtgtgggaacatcgtgctcagtgaccggactaccatggtcccctaaatcgctgatcgtatgagcatagaaatcactgtacttgcgcccag

SEQ ID NO: 188 - DNA, 418 bp, Lilium asiatic
  unsure (1)..(418): unsure at all n locations
  Clone ID: LIB3229-003-P1-K1-G12
cggacgcgtggggggagcacctgtagcgggatttgaggtcccaagctcaccagattctagctacaacaatccgattcctggagcagaagaggaacatgccgatgcaccgcccatccctccccacctgcaccatacaccgctgaacgactataccagaccggatgtgccaggcaatcgcccggtggttcaaaatgtgatcctgaaccatctctacatacataaacgagatcgaccaagctctgtggtggcactggggatgacgcagcgttaccatgataagtatgtcacgacagtgctctataagcctgcatgattgcagagtattggacatggtagggtatctgttagctcaaaagacgtattgtggctctcnggtgccatngggctaaatagacccgagactgattatttgatagat

SEQ ID NO: 189 - DNA, 428 bp, Lilium asiatic
  Clone ID: LIB3229-003-P1-K1-G2
ggacaacttgttcaaaattgaaaaagcaggttctttcggctacaaactgctatactgccccagtgtagccggcgtccctgccgatggtccttgcggtaatctgggtatatacttcgagaatgggaacaggtggttggttctgagcgaccagccgttcttcgttgtctttgtcaaagaacaaaccctcacgagtgctttacgtccgagtgcctggagtcccatgaaataagggttttatgtccgagtgcctgatatctgtttcggtacgagaagtgtcatcaaaataagggctttacgtctgagtagggctttatgtccgagtgtctgttgtgtgtttcggtacgaggagcgtcatgaaataaggaatttatgtccgagtgtttgctaatgtattagtgcatgaagtgttttgaaataagagctttacg

SEQ ID NO: 190 - DNA, 424 bp, Lilium asiatic
  Clone ID: LIB3229-003-P1-K1-G3
agagaaaggtaagaaaacagattggtgaagagtattgagtttctatgagttacttcttaacataagacataatatgagaaaataacttttgagaggaagaagataggctcttcgaaagtgaagaacttgttatcactgaagcatgagttggacccgttgatctaaaagcaatattgttcacgcttggtgcttgtgacttcttggtgaatgcttctcagtgttcaactgtaagttttataacacaagtggaaagcgttgggacactcagcgcgaaacaacaaacgtggaaagatgggacaaattcttcggtctcttcttgaccttttatttatggctcagactcaacatgttacactcgcaccgaaacaccaccacttctcccgaaagaatccacgggtcgctatgattgttagacattttgatt

SEQ ID NO: 191 - DNA, 324 bp, Lilium asiatic
  Clone ID: LIB3229-003-P1-K1-G7
cccacgcgtgcgggcatatcttgtcccttacatatctgctatacaattattagactggactaggagctcaaagcatgatgttaactataatataaatgaagtttcaagaaaaaatccaagtgatgaagaagacatatgcgaccatgactgtacaagaacacacttgcatgagggagaactgctgtttgaatatgtggaatttgacctactttaacacataaacgagatgtacgaaaagattaaggaactcgttagagggacgccatgatactgatagaagaaatgtatatacgagatctcattcaagctcgactgatgtaactt

SEQ ID NO: 192 - DNA, 309 bp, Lilium asiatic
  Clone ID: LIB3229-003-P1-K1-G9
caattccggaatggcccgcgatcgcacccacgcgtaacggtgacacatcagattgttctatagtattgacgtttctatgagtcacttgtgggacataagacatattatgagtaaataactttagagaggaagaagatacgctcttcgaaagcgaagaacttggtatcactgaaacatgagttggacccgttgatctaaaagcaatattgtccacgcttgcggcttgtgacttcttggtgaatgcttctcagtgctcaactgtaagttttataacacaagtggaaagccacgggacactcaccgcctaac

SEQ ID NO: 193 - DNA, 433 bp, Lilium asiatic
  Clone ID: LIB3229-003-P1-K1-H1
cccacgcgtccgcacgaacttcaggataaccacggccagaaagttaggcaggattcagagcacccctttgaagcaggttaaaagcctcaaatttgaatctgcgattgatatgctgaaggacaaggaaaacatgtcagtcatgaagactgatcggcctccacagagcaatattgaaaaatcagcgaaagcaagttcggtgagacggcctctgcagcgtgttgagaagagcaataatgcaggacaataaagaccttttatggtgcatatttttaactattggttgatgggcttatctgggagttgttgatgttgttgtgtaagtttgtaatgttaagttgtgagcctatatatggctgaatatttttccacggctgattgtattttatctactgtgtttggtgtgttaaaacattgtggtttgaatgaaaattgc

SEQ ID NO: 194 - DNA, 311 bp, Lilium asiatic
  Clone ID: LIB3229-003-P1-K1-H3
caccaccacgcgtatcaatctagatcaggacgcggcaaggtaggaaaggcactcttacaggcccgtgcctaccgccacctaacggttcttatggataacattcaatgcattaccaagcccgcgatccgacagctcgctcaccgcgaaaacctgaacaggatcaaacttcttatctacgaagagactcgcggtgtgctcaagatctttcttgagaacgagatccgcgatgctgtgacctacacacagcatgcccgcctcaagaccgagacggacacggatgttgtgtatgcactcaagcgccaggggcgaac

SEQ ID NO: 195 - DNA, 98 bp, Lilium asiatic
  Clone ID: LIB3229-003-P1-K1-H5
tctagaggatccaagagctacctacgcatacgttccacgcttacgttcgcgtgcatgggacgttatagctattctatagtgccacctaaatatcaatt

SEQ ID NO: 196 - DNA, 430 bp, Lilium asiatic
  Clone ID: LIB3229-003-P1-K1-H7
cccacgcgtccgcccacgcgtccgggttacttcattcagcccaccgtcttctctgatgttcaggatggaatggcaatagcgaaagaggaaatatttggacctgttcaatcaatcctgaaattcagtgatctgaacgaggtgatacggagggcgaacgccagccgttacggtctggccgcaggagtcttcaccaaaaacctcgatactgcaaacaccttaacccgtgcgctgcgagcggggacaatatggatcaactgcttcgatgtcttcgatgctgcaattccattcggtggattcaagatgagcgggcaaggaagggagaagggcatcgacagccttaaagcctacttgcaggttaaggcggtcgtgactgcgctgaagaatcctgcatggttgtagttatttactgtgtgtctgtcacggttgaata

SEQ ID NO: 197 - DNA, 164 bp, Lilium asiatic
  Clone ID: LIB3229-003-P1-K1-H8
gtaatgaagtgtctatcttagttagaatttgagtttgaatgttttagatgcgcagtattgtaataataaacattggaaacgtgaccatctagtaataggagatgctcctgttttctttttcaaaaaaaaaaaaaataaaaaaaaaaaaatataaaaaacaaaaa

SEQ ID NO: 198 - DNA, 419 bp, Lilium asiatic
  Clone ID: LIB3229-004-P1-K1-A1
attacgcgaacgcagaactgctgcaccatgtgttaaccctagggacgccaaggactccgatggtaatcctttacgagagttagccaaggatagtgtacgactagtcaagcgctgccacaagcccgatcgaaaagagttcacgaaggtggcgttccggacggcgatcgggttcgtggtgatgggattcgactgcttcttcgtgaagctgatcttcattcccataaacaacatgatcgtcggatctggataggcggaagacatccatttcaatggagagagacttttatttgtcttttttttaccccttttcgaaatgatatttgatattttagtctaaactttttgttgaagatttaaaactatgagaaacatgttttagaactatgagaaaaatgtatgacaggaattccatcccgaaa

SEQ ID NO: 199 - DNA, 267 bp, Lilium asiatic
  Clone ID: LIB3229-004-P1-K1-A10
tctacgcgtccggccacgcgtctagtagatcgagggtggcctatgtagacgatccaagtttacgttcgcgtgtatgctaacttatagctaatttattgggcgacgtaaataaaatgtactggtcggagatctacaaccgttacgactgtgaataccctggcagtacataactttatcgcctggtagcatattagcctttaggcaggtggcgttatagcttagaagcagttgcccatcgtgattggcaactggtacgcaccctgtatg

SEQ ID NO: 200 - DNA, 126 bp, Lilium asiatic
  Clone ID: LIB3229-004-P1-K1-A11
cctagaactacctcgactcgtgcgatataacaccgcttggcctaactggcaacacgggcgatatgctctgtgcatctggccaacataacaattgaacagaatgctttgtttgataatagtagttca

SEQ ID NO: 201 - DNA, 269 bp, Lilium asiatic
  Clone ID: LIB3229-004-P1-K1-A12
cacggggctaaatcaaaagatcggtttctcactacaatatagcaatgtgacattgacttgcttcctggaatcttcactgaacaatacaaatagatatggagcccggctatggaaagagtaacagcgcacgtgagtattgaagcactatttagtgcctcaaatccggacgaaccactggcatgaggacataggaaaaatttgaagtcaaatgaatgtactaggtgtagtacatgaactgtatggacccatctatattctactgacgcgtg

SEQ ID NO: 202 - DNA, 316 bp, Lilium asiatic
  Clone ID: LIB3229-004-P1-K1-A3
ctactgcttccggataaccaggaaggaagcataaatccagggatgccaactttgaatttctgatatacttgtcatttcgcccaaaatttcttctcttcggagctggattttcgtattgggataattatcaattgaatgctctgggaaaaattgacagttctgggtggagtttccctgtaagttgaatggtaaggggaaatgagaatgaaactgtaacaattcgtgttgtgtttaaggagcactgttgcagatattcaattgtgcgatggtccaggagtttttacttcacgatggctcttatgacccactttttatg

SEQ ID NO: 203 - DNA, 157 bp, Lilium asiatic
  Clone ID: LIB3229-004-P1-K1-A5
ctactgcttccggataaccaggaaggaagcataaattcagggatgccaactttgaatttctgatgtacatttcatattatccaaaatattcttctattcggagctggattttcgaattgggataattatcaattgaatgctctgggaaaaattgaca

SEQ ID NO: 204 - DNA, 286 bp, Lilium asiatic
  Clone ID: LIB3229-004-P1-K1-A8
gaagttcttcacagaaactgaggagaataatcagatgagaggaccgaggacaggggtcccatactatcttatgagttccctgcttctttggaggtaaagataaagctgcatgtctgccatcctgagaagtaaaatgtagtagaagatgatagccttggactttgtgctggccagacctttgcatatgttgtctgattttccaacttggccgtactcattgtatactattactgacaattcatgttggcagtatatatagtttcgattgacactttatatgtttttt

SEQ ID NO: 205 - DNA, 411 bp, Lilium asiatic
  Clone ID: LIB3229-004-P1-K1-A9
gaagttcttcacagaaactgttgagaataatcagatgagaggaccgaggacaggggtcccatacttcttatgagttcccttcttctttggaggtaaagttaaagctgcatgtctgccatcctgagaagtaaaatgtagtagaagatgatagccttggactttgtgctggccagacctttgcatctgttgtctgatttcccaacttggccgaactcattgtatactagtactgacgattcagttggtgtattaagttttgatgtcacttcttgtattttaaaatcacctttcagcttcaggttctgcatggagggataggtggattcaatgaagatgttgcaggattgccatatagtacaagcctcgtgttgtgttgatattatcctaggtttgttaggaccaaaagcctgt

SEQ ID NO: 206 - DNA, 184 bp, Lilium asiatic
  Clone ID: LIB3229-004-P1-K1-B10
aagcaccgtcgcttgaagaagttgtttgacggaaaagaaggacgaccgaaataccctcgacgatgggtgatatttcctccattcctctgaggcatggtggcttttaggcttgatttctctttgattgtacttgaattgtactgcaatttagctctacattttaattgaacattgttgtttctcg

SEQ ID NO: 207 - DNA, 344 bp, Lilium asiatic
  Clone ID: LIB3229-004-P1-K1-B11
cggacgcgtgggcggacgcgtgggcggacgcgtgggttcagcgtctatttcggccggcggcttgccgaggagactgggaatcgggttcgcgggtacttcttcgagcggctggtgccatcgccgacttggattttgaaggcgtgggagtacactgaggatgatattcttacgattgccgggctcgatgcggttgtcttcctcagaatacttgttttcagtatacgcatcttctccattgctgctgttgtgtgtgtatttggggtactaccgttgaattactttggacaagaaatgcgtcacagacaaattccttcagaatcattagatgtgttcaccattgcaaa

SEQ ID NO: 208 - DNA, 383 bp, Lilium asiatic
  Clone ID: LIB3229-004-P1-K1-B2
ttcagtgtcatgagaaatcaacagctaaataattctccagtacattcacaaaaaaggaggtctgagataaaactcacaggaattcctgaatttagtaaaataataaaaacaacattttacgagatgttgttgaccacttactcggatttaatgaggcggcagcaaatgcagtatctttgacccacttaattttctcttcgcatcttgacattgagtggtatttccttgtagcagaccttctctttggccctacgtgtgggccggtcgactgataatctccgtacctcctgaatctgagtttgtgatgtaccaattggttccttctgaatctgaatgtgaacttgtgatgtaattggctccttctgaatctgaatctgaacttg

SEQ ID NO: 209 - DNA, 365 bp, Lilium asiatic
  Clone ID: LIB3229-004-P1-K1-B3
ttcagtgtcatgagaaatgggcagcttgtgtaattttccagttcattcacaaaaaaggaggtctgagataaaactcacaggaattcctgaatttagtaaaataataaaaacaacattttacgagatgttgttgaccacttactcggatttaatgaggcggcagcaaatgcagtatctttgacccacttaattttctcttcgcatcttgacattgagtggtatttccttgtagcagaccttctctttggccctacgtgtgggccggtcgactgataatctccgtacctcctgaatctgagtttgtgatgtaccaattggttccttctgaatctgaatgggaacttgtgatgtaattgcgtccttct

SEQ ID NO: 210 - DNA, 204 bp, Lilium asiatic
  Clone ID: LIB3229-004-P1-K1-B5
aaaaaaaacaaagaaaaaaccaaacaagtttaaaaaataaaaaaaaacaaaacaggggtggggcggttgtttttttaaagttttccacaaaaaaccgaacaaaaagcacatgaatgacagtaatgagtaggaatataataatggtggatggaacttcaaaatacaataatacggctggagatatatagggtcaaagactattta

SEQ ID NO: 211 - DNA, 108 bp, Lilium asiatic
  Clone ID: LIB3229-004-P1-K1-B7
gacctatgcgtccggaaacacaacgggagcgtttgttctatatgatccaagcaacaaacgggtgcatgggacgttataacttttctatcacgtcacctaaatacaatt

SEQ ID NO: 212 - DNA, 189 bp, Lilium asiatic
  Clone ID: LIB3229-004-P1-K1-B8
aagaaacaccgtgccaaatcttgcacatacataaacgacacaacacgggtcgggggtctactttttattgtccacaaccataaacagagaagatacgcaaggcacatcatgactagccttgagaggaggaaccagtgctacaggataatcgaactacaatcatcacatgagatgcatatacggcccata

SEQ ID NO: 213 - DNA, 224 bp, Lilium asiatic
  Clone ID: LIB3229-004-P1-K1-B9
cagtgctgatgtttgttgtggtgttcatcaagctggggctcttctaggcatggccaggacggagacagtgctttatctatgtatctttttacgtgattcggctcttttttttaggtgcttagattggtgtggctgatatgttatggttctacgtgaaatgagatgaggtttgtttgggatgttaggcggttaaaaaaaaaaaaaatgaaaaagcaaaaataaaa

SEQ ID NO: 214 - DNA, 378 bp, Lilium asiatic
  Clone ID: LIB3229-004-P1-K1-C1
ttagaaggcgctgaagcacgtccacctcgacatcctgatcatcagcacggacacgcagagcgtgtgcagcttgatctacgaccagctgaacacgatgacacacgactgtcgcacggcttgacccatacaacatgaacaacacacactacgttgcacagagacccagacactgcagacgtctactgcctctggacgagcaagacaagcacgccgctgatgatggttccaatggacccacaaagtgcactagaggttcgggtaaaacaaaatgtcacaaatccttcacactgatgtacttaaacgattgtacaactggacgagtcttaatagatgccgatctgtttatggttcttataattcctgaatttaaatcttatt

SEQ ID NO: 215 - DNA, 154 bp, Lilium asiatic
  unsure (1)..(154): unsure at all n locations
  Clone ID: LIB3229-004-P1-K1-C10
gaaacgtaacggcccgagccagaacgggggagagggggcacacgcacgggccagagggggcaaaggaggaggtgancaagcaggcaacaaagcggcgaaggacggatctgaagaggggaacgaacgaggagcacaagatcaagcagaggagaag

SEQ ID NO: 216 - DNA, 302 bp, Lilium asiatic
  Clone ID: LIB3229-004-P1-K1-C2
aataatggtcctgtaaaaatgtttcacctcgtcatactgatattacaactaggatatggaagtacatgaaaaatgtgcatcgacgtcttaagaatccaagttgacttacttagtacttccgacgttgtctcctatttatgactaaccccaaagtcaattgactggatctagctttaggacatgatacgttttggaaaacgctcgagtaaactacgttgaattttgttgcaacaaatgatgactttaatgtgattccttaaaggcgtataacaccctaacaataatctgttttaatatatggg

SEQ ID NO: 217 - DNA, 408 bp, Lilium asiatic
  Clone ID: LIB3229-004-P1-K1-C3
gctgagagtaatgcagatatgaaaggattggatgttgatgctctctacatatctcatattcaagtgaatcaggctcagaagcaaaggcgccggacatatcgtgcccatgggcggatcaacccttatatgtcctcgccttgccacattgagctaatattgtctgcgaaggaagagccggtcaagaaagagcctgaaacccagattgcttataggaagtctaagaaagctggcgttctccgcagtggtgcttcatgttaaaccatctcaaatctctcagattggggaattgtgttgcaggtgtgaacaattgcaaatatttttatttgagcagactttttttgcatgtttggggtgtatttctggtgagacaattatttaccgtcttagtgtgatcattgcaacattatt

SEQ ID NO: 218 - DNA, 335 bp, Lilium asiatic
  Clone ID: LIB3229-004-P1-K1-C5
cccacgcgtccgggctgatctccgcttccagagctcggccgttgcggcgctgcaggaggcgtcggaggcctatctggtgggtctgttcgaggacactaacctctgcgcgattcacgcaaagagagtgactatcatgccgaaggacattcagctggcgaggaggatccgtggtgagagggtttgattgttactctcctgaactttgtttgcaactagcagtgatgatgtatgatgttggtttttagctttaagttatccttcgcttcttgcgaaaatgatgtatcttaatatttgctgggttgtaagagtcggtgaagtactagctattaagtttc

SEQ ID NO: 219 - DNA, 335 bp, Lilium asiatic
  Clone ID: LIB3229-004-P1-K1-C6
cccacgcgtgcggcctgatctccggttccagagctcggccgttgcggcgctgcaggaggcgtcggaggcctatctggtgggtctgttcgaggacactaacctctgcgcgattcacgcaaagagagtgactatcatgccgaaggacattcagctggcgaggaggatccgtggtgagagggtttgattgttactctcctgaactttgtttgcaactagcagtgatgatgtatgatgttggttcttagctttaagtaatccttcgcttcttgcgaaaatgatgtatcttaatatttgctgggttgtaagagtcggagaagtacttgctattaagtttc

SEQ ID NO: 220 - DNA, 400 bp, Lilium asiatic
  Clone ID: LIB3229-004-P1-K1-C7
gtttgggactgtgtacaagggttacattgatgagaatgtgcgggttggcctgaaatcgcttccggttgctgtcaaggttctgaataaggatgggcttcaggggcatcgggaatggcttacagaggttaattttctgggacaactgaggcatcctaatctagtgaagctgattggttattgctgtgaggacgatcatagactacttgtgtatgagttcatgttccgtggtagtcttgagaatcatttatttcgcaagacagccgctccgctaccatgggcaacaagaatgatgatagcactcggtgctgccaagggactagctttccttcacaatgcagaaaggcctgttatctaccgagattttaagacatcaaatatcttgttggactctgattatacg

SEQ ID NO: 221 - DNA, 387 bp, Lilium asiatic
  Clone ID: LIB3229-004-P1-K1-C9
gatcgagaaagagggcaagcgatgtcttagaagaacaatctcaaaacgaggaagaggcagtacgatttggagctcaagagagagaaagaggtgaaggagaaaaggccgcagaagcttcaagcaaagaagtacaagatgaaggtcgttggccgtgaaaagaagaagaagaatgctggtggattgcaggttgggcaaagatagcttactaccaaattgactgcatgtggcaaaagctaaagcagcactagcgattgaggtagatcattaagtgtcactctactgttcgaatttgtatgcatatacaactccatggttctgaggtactatattagttctgataggactattgtaacgacatataccaagatttttagacatatacaatac

SEQ ID NO: 222 - DNA, 237 bp, Lilium asiatic
  Clone ID: LIB3229-004-P1-K1-D1
caggaagatcctgccccaattgcacctacacattctaatccccagcacggctatggggatcatgaacagtttcatgatcatccttttcccgaagataccgcaggagtacgtccggcttgccctcttcaacaagaagaacaccatttccatttagctcgatccacacctttaaccggctgcattttgaaagcgagctcgttaagcacgcaaagtgtgctggcaccaatgctgtcatca

SEQ ID NO: 223 - DNA, 383 bp, Lilium asiatic
  Clone ID: LIB3229-004-P1-K1-D10
gtgttgaagcaggtccaccccgacatctggatctccagcaaggccatggggatcatgaacagtttcatcaacgacctcttcgagaagatggctcaggagtctgctcgtctcgctcgctacaacaagaagaacaccatcacctcccgagagattcagacctctgtccgccttgtcctccccggtgagcttgccaagcacgctgtctctgaaggcaccaaggctgtcaccaagttcaccagcgcttagtcttacggtgtgtttaagactgatcgagcgtctgtactttgtagctgctattaatgtgtttcgatttctgatcgaaacttatgttatttcagtttccttgtgttgaaacttgctctataaagcaattatttgtctcc

SEQ ID NO: 224 - DNA, 364 bp, Lilium asiatic
  Clone ID: LIB3229-004-P1-K1-D11
aagaaggactaggacaagcgaaaaaaattagggaaggtcacgacaacagaattggcgaatgcatatgaatgactattaaataagagagcaaatactaaataggcatgttatgatgatgctaatgaggatgatccacaaatactagaaaaaggcacgtgaatgaaacagattaaggtagaggatggaccatctaagatgatagctgaaacctggcaggacaattattaatgatgtatacatggatgaactacataatctatagaagggcatttaaaagaaacatgtattggcaattaaataaccatgtaatatgattgctaaacctaacaaggctagttgtgatgatttttgattatgtcataaa

SEQ ID NO: 225 - DNA, 400 bp, Lilium asiatic
  Clone ID: LIB3229-004-P1-K1-D12
aagaaggacgaggacaagccaaaaaaatcagggaagggcacgacaacaaaatcggcaaaggcagaggaaggaccatcaaagaagagagcaaatactagtaaggcaagtcatgatgatgctgatgaggatgagccacaaataccagaaaaaggcacgggaaagaaacagatgaaggcagaggaaggaccatcaaagaagagagcgaaacctggcagggcaattattaatgatgttgacaaggatgaaccacaaaacccagagaagggcactgaaaagaaacaggcaaaggcaacgaaagaaccattaaagaagatggcgaaacctagcaaggctagttgtgatgatgttgatgagccacaaaacccagaaaagggggctggtaagaaacaggcgaatgcat

SEQ ID NO: 226 - DNA, 60 bp, Lilium asiatic
  Clone ID: LIB3229-004-P1-K1-D2
aaaaaaaaaaaaaaaaaaaaaaaaaaaaaaaaaaaaaaaaaaaaaaaaaaaaaaaaaagg

SEQ ID NO: 227 - DNA, 242 bp, Lilium asiatic
  Clone ID: LIB3229-004-P1-K1-D3
atgacacatgggtggctgaggtggagtaattttatgtgcttttaactataaactgtggactggtggttattgttttgtttaatataaagatctatagtaaatgctttgttgcgaacaggtcttctgttgacaattcatggatttaccatgggttaattcatgaatgcataattgagtttttattttacctgctggaattatctaattactagatattataaaaaatatatatttcttcaata

SEQ ID NO: 228 - DNA, 299 bp, Lilium asiatic
  Clone ID: LIB3229-004-P1-K1-D4
gctcacctgtgacaccttctgctcgtgacaaaaatgtgagcggaagtcccaagaagcagagccctggcagaggtgaaatctgattgcagcccgaattgagctcggacgcaaaatgtgttctcggggtatccgcaaaggattttcttctgctctgctcagtgatgttggtagtttctgttagtaaaatctgatttggaatactctgaagacttatatcttttggctgtgactttgttattattatgtcaaaaatatcactgatgctgcatggcagatgatggtgatacatttatggtttt

SEQ ID NO: 229 - DNA, 322 bp, Lilium asiatic
  Clone ID: LIB3229-004-P1-K1-D7
aagaaggactaggtcaagggataaaaatgaggaaagggcacgacaacggggtgggaggaggatttgtagggaccaagaaaaaaaagagcaaaggctagtaaggcaagtcatgaataggttgatgaggatgattcacaaatacaagaaaaaggaacgtaaaaaaaacagatgaaaggagatgaaggaccatgacagaaaaaagcgacacgtggaagggcaaatattaatgatgatgacaaggaagaaccacatatcgcataaaaggggattgaatagaaagaggcaaatggaatgaaggtacaattaaagaagatggagaaat

SEQ ID NO: 230 - DNA, 408 bp, Lilium asiatic
  Clone ID: LIB3229-004-P1-K1-D8
aagggaagagagagtgtgcgtgaccggggcaggagggtatatcgcctcatggctggtgaagcttctcctctccgagggctacatggttcacggaaccctcagagacccaacctcagttgttgcaggatgtgaaggagtcttccatgttgttagtcccgttccttccagaaaagtggacaatccagaggttgaactatacaccccagctgtaaaaggcacccttaatgtacttgaggcatgttccgaggcaaaagtcaaacgggtggttgtagtgtcttctgttgtagttgtgacgatgaatcccaattggccgaaggataaagtcatggatgaggattgctggtcggacaaagattactgcagaacaactgacaggaatggtactgcctttccaaaacacttgcagaa

SEQ ID NO: 231 - DNA, 302 bp, Lilium asiatic
  unsure (1)..(302): unsure at all n locations
  Clone ID: LIB3229-004-P1-K1-D9
gaagacccacgcggacgaccacacgaacggccgcagaagccaagaaggagacaacagagggacaagaaggcgaggccacgggggaaacggcgaaaatgaacaaccaccanacacggaagcnggaaaagacgaagaaggaaaggagacgggagaacaccaaggaggaacaaagagaaggagggaggacgaaggaggaaaacgcgacacgcccaggacaaagcggcaaggccgacggaaacacaacggagggaaaggagggagagaagaaccccaagaaacgacaaaaagaaaaagggaggaaa

SEQ ID NO: 232 - DNA, 408 bp, Lilium asiatic
  Clone ID: LIB3229-004-P1-K1-E1
cccacgcgtccggccgcagctgccaagaaggagacaacagagggacaagaaggtgatgccactgctgagacggtgaaaaagagcagccacgttacacggaagctggaaaagcggcagaaggataggtcacttgattcctccattgaggatcaatttggaggagggaggttgttggctgcgatctcttcacgcccaggtcaatgtggcagggccgacggatacatattggagggaaaggagtttgagttttacttcaagaaactccagaagaaaaagggtggtaagagtggtggtgctgcctgagttatgatagtcgatttaatttggtggagtttgaggtcttctctctacttgtcttggttaaagttgtgaaagcattcggccattggtcttagtattgaactaaag

SEQ ID NO: 233 - DNA, 149 bp, Lilium asiatic
  Clone ID: LIB3229-004-P1-K1-E11
acgcccacacatactcttctagatctcgaacatccgatctagacgacccgggggtactaacacattttttctactccacaaaaatactataaaatcacccaatatttaatccactgtccctatattaacaacttcatactcttacaaaa

SEQ ID NO: 234 - DNA, 386 bp, Lilium asiatic
  unsure (1)..(386): unsure at all n locations
  Clone ID: LIB3229-004-P1-K1-E3
atcaaagtgaaggggggtcgtcgtatgattggaaggatgtttttgtgaagcactatacggaggttatttttcagccaatgaattcaaaaaaggcaaggaagttcaagctctcaagcattgcctcaataaccctcagcgcctagtgattgttggggaatacagtgctcagtatagtctcttttctgtttctgcttgtggaatgcataatatgtatagtttatagcatctcattgcctgttcctgttgttactataatatggatagtaaaatcttgcaacaatatggtgtaaccgtgttgattcggtggttcacttgcatngtggcctaaatccgaatactaaaatgagcataatttcttgaaacaaaaaaaaaaaaagggccggccg

SEQ ID NO: 235 - DNA, 203 bp, Lilium asiatic
  Clone ID: LIB3229-004-P1-K1-E4
aaccaacattcacctcctacacttcccttactcaagcaatcatgtcgatgattcacgttatccatctccttctagccctctgtttgctccgccccgctagctccgatttcaattgacttgccgccgagtgcccacacaagctcttggagctgattacctgcctaccctacgttcagggcaacactaaagctcctacacccgac

SEQ ID NO: 236 - DNA, 357 bp, Lilium asiatic
  Clone ID: LIB3229-004-P1-K1-E6
ctcaaagatgtagtagctgcaaaaccagagaagcttcatgctttagtggttgacagtggagaaaactggagtgtgggacagaggcagcttctctgtttgggtcgcgttatgctgaaacgcagcagaattctgttcatggatgaagcaactgcctcagtcgattcacagacagacggtgtaattcaaaagattattcgagaagacttctcgtcttgtacgattatcagcattgctcatagaatacctacagttatggattgtgatagagttcttgttgtagatgctggcattgttgcggagttcgtcttaccatttttgctttgatcgaacgtccttcttttttttatagctttagtt

SEQ ID NO: 237 - DNA, 107 bp, Lilium asiatic
  Clone ID: LIB3229-004-P1-K1-E7
aatgcgagcgggcgttattgttgatccaaactaacgtactcgtgcatgctacgttgtagttcttttattttgtaacagaaatacaatacactggccgtagtgttaca

SEQ ID NO: 238 - DNA, 369 bp, Lilium asiatic
  Clone ID: LIB3229-004-P1-K1-E8
gattgaagcagatgggcaaatcctgcctgatggagcactcaccgtaggtggcaaaacagttgcagttgtctatttcagagcgggttactcacccaatgattatccttctgaatcagaatggaaagcaaggcttatgatggaagaatccagtgcaatcaagtgcccatctatatcgtatcatttggtgggaacgaagaagatccagcaagagctagcaaaaccttctgtgcttgagaggttccttgaaaatgagggtgacattgcaaaactgcggaagtgctttgctggattgtggagtctggacaaccctgttgctgtgagggatgcaattgagaaaccggaattgtttgttctaaaaccccaacgcga

SEQ ID NO: 239 - DNA, 217 bp, Lilium asiatic
  Clone ID: LIB3229-004-P1-K1-E9
gaccgatctacggtcacctattccggctaccgcgcacatccaagaaagctgcaaagacttctagagtctttctacacctctcccctcttctattattgcattaatttgagtcaagagctaaaggagttccttatttacctgcaggttcaccggaggaatgtggagctttgagaaggatcacgtgggaaccagaagcactcttaaaaggtgatgaagg

SEQ ID NO: 240 - DNA, 318 bp, Lilium asiatic
  Clone ID: LIB3229-004-P1-K1-F10
ccacgcgtccgctctgatcaacaaatctgcgaaggagtgaactttggtgggtggatctagttgggtgtcttagttatgtgtaggtgtatctgtggttgtgtcctgtttctgctatgggttgttggttgttggttgtgtcggatctgatgaattgtggtcgtttaattacgatgtagacttgttttaatgtcgctagcttgttaaaattgtcgtttttcgttgtattgtctgtttttatatttgcttctagtttttcatgtcacttatgtaaattcatttggtttttgttatattcaatattatggaaaaatttaaata

SEQ ID NO: 241 - DNA, 304 bp, Lilium asiatic
  Clone ID: LIB3229-004-P1-K1-F5
ctgcaagagtatatcttgtctttcctagtggaggagatgattatggatttcaattggcaagtaagtctttgtgtatacttaagattaagaatcttgcattctctcacgcatcacctggctccaatgtaaacgttctagaccatttttatttagggctttggcgggtcttttcataattctcaactatggctaattaacataatgagacttaacctaatttataatgtatcagaaatacatcaaagtattttttatatttggtcgtccctttctatgattaaccaaacttatctacgctgtgctt

SEQ ID NO: 242 - DNA, 386 bp, Lilium asiatic
  Clone ID: LIB3229-004-P1-K1-F6
agaaggcaccctaccaggccaaatctgagaagcggaagactgagtacaacctgaagatggatgcttacaacaagaagctggacggagatgctgagggtgaggagtcagacaagtccaagtctgaggttcatgatgaggaggatgaggaagggagtggtgagaatggtggtgatgaggctgatgtgtagatagcaggaagaccttcatggcaactcttggtggatgtttttgtctttggtttattttctgtctaaatgtgttggaactatagcaaatagagcttcttagtaaagcttagtgtttgatctttctttggctgatggatcttgctgtacctggctttgcttttctctgtttaatgggaaccggtgctgacttacttcctg

SEQ ID NO: 243 - DNA, 57 bp, Lilium asiatic
  Clone ID: LIB3229-004-P1-K1-F8
aacacacagaaccgaacacacgacgccaaaagaccgcacagaccacggagaacaggg

SEQ ID NO: 244 - DNA, 384 bp, Lilium asiatic
  Clone ID: LIB3229-004-P1-K1-F9
gatgcgaaaaatggctgccatggatcaatggttgttgaggcctttgccagcaatgcaactttgaaagttccttatgactctcacagtaaaggagggtttactacaggagctttgaagtttcaagcgattaaagctacaacgaggatcaccttctatagttcaaactaccatactaggattgatgatgatgctggagctctgtgtggtccggtgctcgaccaggttagagtctatcctgtggcttagtttgatggtgattttcgaccgttggggacttatgttgcttaatctatctgttcgactatgttgtcttagtctgatatcttgttaagtgaaagtgatgaagtgagaatgtcactagacatttatatgctacgcccgttc

SEQ ID NO: 245 - DNA, 611 bp, Lilium asiatic
  unsure (1)..(611): unsure at all n locations
  Clone ID: LIB3229-004-P1-K1-G11
aaaaaaaaaagaagaaataaattaaataaaaataaaaaaaaaacaaacaaaaaaagggaaggggactgatcttgaacgcgaaacaaaaaaaaagaagaaaaaagaaaaaaaaagaaaaaaaaaaagaagagaaaaagaaaaaaaagagagaaaagggggaaaaagaaaaagggggaagggaaaaaaaaaaaaaaaaaaaaaaaagaaaaaaaagaaagaaaaaagaanggaaaagaaaaggagaagagagagaaaaaaaagaggaagaagaagaaagaaaggaaaaaaagaaaagaaagaaaaaaaagaagagaaaagaagaaaagagaaaaaaagagaaaaaagaaaaagaagaaaagaaaaagagaaaaaaanaagaaaagaaaaaaaagaaaagaaagaaaagaaagaaaaaaaagaaanagaagaaagaaaagaaaaaaaaaagaagaaaaaaagaaaaaagaaaaaaaaaaaaaaaaggaagagaaaaaagaaaaaaaaaaaaaaaaaaaaaaagaagaagagaaaaaaagaaaaaagaagaaaagggagaaaaaaaaaaagaaaaaaaaaaaaaaaaaaagaaagagaaaaagaaaaaaaagaaa

SEQ ID NO: 246 - DNA, 145 bp, Lilium asiatic
  Clone ID: LIB3229-004-P1-K1-G2
tgaaaatattcatgtgggggttgtatcatcctgaattgtagtttttctgattggtggctactcccatatctactcatggttggattataaacctgttgcatgtcctgctcactggaaattggataaatatatttcatttcccttg

SEQ ID NO: 247 - DNA, 145 bp, Lilium asiatic
  Clone ID: LIB3229-004-P1-K1-G3
tgaaaatattcatgtgggggttggatcatcctgaattgtagttcaactgattggtgggtactgccatatctactcatggttggattataaacctgttgcatgttctgctcactggaaattggataaatatattttatttaccttg

SEQ ID NO: 248 - DNA, 389 bp, Lilium asiatic
  Clone ID: LIB3229-004-P1-K1-G4
gaaattacaaagttgtatacaggcgttatgcatcacttttcttcttggtgggagttgacaatgatgagaatgagctagctattttggagttcatacatatgtttgttgagaccatggaccgccatttcgggaatgtgtgcgagttggatattatgctgcatctggagaaggcacacttcatactggaagaaatggacatgaatggtttcatagtacaaaccagcaaacctgacattcttgcgttgatccagctcatggacaaaacttcttagctcatgtaccaactcattgatttttttgtattttccgtggctttcaagcttttcatgttggatttgtgtgttaacaagtaattcggtatggaagaggatactagcatgatttgcacg

SEQ ID NO: 249 - DNA, 263 bp, Lilium asiatic
  Clone ID: LIB3229-004-P1-K1-G5
gaaattacaaagttgtatacaggcgttatgcatcacttttcttcttggtgggagtggacaatgatgagaatgtgctcgctattttggagcacatacatatgtttgatgagaccatggaccggcatttcgggtatgtgcgcaagttggatattatgctgcatctggcgaaggcacactgtatactgtaagaaatggtcatgaatggatggatagtctaaaccaccaaacttgtcatattcgcgatgaatcatgttttggacaaa

SEQ ID NO: 250 - DNA, 397 bp, Lilium asiatic
  unsure (1)..(397): unsure at all n locations
  Clone ID: LIB3229-004-P1-K1-G6
ggaagggaagtgggttgtccaaggagccctcaatgtagatattggtgcaaatccctcagctgaaggtggtgaagatgatgaaggggttgatgaccaggccgtaaaggtggttgatattgttgacaccttccggcttcaggagcaacctgctttcgacaagaagcagtttatggcatacatgaagcggtatgtcaagcagttgacgcctaaacttgatgccgagcagcaggtgctatttaagaagcacattgagggggccattaagtttctgcttccgaagctcagtgatctgcaattttttgtgggtgagagcatgcaagatgacagtagccttgtgtttgcttattacaaggaaggtgctactgatccaacctttntgtacttcgcgtacggattg

SEQ ID NO: 251 - DNA, 204 bp, Lilium asiatic
  Clone ID: LIB3229-004-P1-K1-G8
acgtgcgaatttgcggcaccgtattagaattattaccaacggcacgctgggggcctaagtgcgatattgacagtacaagcttttgatatcgccaaaaccttaaatgtcaagcttagcaacacttctaaatgccatattttcccgtcgcatacgtcttcaggacgatattagtcacaggtttttaattgtcagtgagtgaaatat

SEQ ID NO: 252 - DNA, 183 bp, Lilium asiatic
  Clone ID: LIB3229-004-P1-K1-G9
gattgagtgggttcgcgtgcaatcacaaacaataacaatgtcaatacgggcaaatgctagaacgtttactacgctgcccaacagatacaccacttatatatacggctgacagacttagaacccacctagtacacttttcctacagattacagtgctagagcacagatttatagacttatgttt

SEQ ID NO: 253 - DNA, 64 bp, Lilium asiatic
  Clone ID: LIB3229-004-P1-K1-H1
cggaaaaccggggcgacctacgcgtaccaaggaaacttactcgttcgagcaacaaaataaaaat

SEQ ID NO: 254 - DNA, 231 bp, Lilium asiatic
  Clone ID: LIB3229-004-P1-K1-H2
gccaggaacaatcggatttgcagataaaagttacggtttcgctctcggatttgcaggtggaaggttcagttttgttttctgacagcagtagttcttctaccaatattatgagattggaaactgagatgaataatttcacactgatggaacgcgtaagtattgtgaatgtgaaaccaggcctatccgattggtgtggttcttcacttttatgctttacctattatttcttaa

SEQ ID NO: 255 - DNA, 386 bp, Lilium asiatic
  Clone ID: LIB3229-004-P1-K1-H3
attaccgcaacatccttgacaacaaggggctcttgctggtcgaccaccagctcgcctatgataagcgcactcgcccatatgtgctgaaaatggcgaagagccaggagtacttcttcaaggagttcagcaggggcattaagattctcactgagaataaccccttgaccggtgacaagggagagatcaagcttgaatgcaacgtggctaacaagaggcactaaatagtgttggggctgaaaggagtgtgtggggtggccctcctatggatggggacggcgctgtggatgttgttgctgccccttttcctttgtttttgtttcggtgttatcggcgcctagctaggattgtgggtgatgaaaatgtattatctatgaaaggaggatgtt

SEQ ID NO: 256 - DNA, 391 bp, Lilium asiatic
  Clone ID: LIB3229-004-P1-K1-H6
cggacgcgtgggtttgccgtcttgacagacacattccacaagcctggtttcaagctacatgttgcggtgttacatcatttgttttgcctggttgattctattgcattgaccgagcctttgtgggatgcatcggtggtaccatatacatgtccaaataatgcagtatttatttgtaattataccatagaactcttggcaacgtcgtttccaaatatgaccacagctgagattactggttttgtcagtggactcattgagtctaggtcggacctaccgacattcaaaaaccgcattcgcgattttcttgtgcaatcgaaagcgttttcagctcaggacaacaaggacctttatgccgaagaggctgctttccagagggaaagagaacgccagc

SEQ ID NO: 257 - DNA, 370 bp, Lilium asiatic
  Clone ID: LIB3229-004-P1-K1-H7
cccacgcgtccgctcaggtatgcgtctgggagaaggcttgaagctcctgtggcatagcctgactccactcattacttagaactgcctcctggtaagatagtggctccctgatgttatgcaccgcaaaaagaaaagctcgaaacattggcgcgtaagtgacaactgatgtcaaacccaagcgcttcgtctttcgacgaacgcgcccggagcggcgtggagctgcaaggtcaggtaaggcaggcattgatggaccatggactggcttgggtgattctgcattagcatgatacttatgcttcacgcgacaatagaaaaagtaaggggcaacaagacgaggttgtgctacacgaagaactggggctggagtaga

SEQ ID NO: 258 - DNA, 366 bp, Lilium asiatic
  Clone ID: LIB3229-004-P1-K1-H9
gatcctgctcgttcagctgctgaaactcaccgctgccggcaaactcaccgagctcgggaattcttacaagatcgctgcaaaacctgttgcttctggtgaaaaagacatctgtctctgactagccgaagataaagtctactgctgctaaaccgaagtgcactgctgtgaaagcgaagaaggctgcagttaaaccgaagccaaaattatctgttgcgaagcctaaagccaaacctggttgtgcaaatctgtatacaggagtgtatgccaaggctggtcaaccaaatcctaagactgttggtcgatcggctaatggagggaagggcttattcaaagccactacttttattaagtcgaatgaagctgctt

SEQ ID NO: 259 - DNA, 411 bp, Lilium asiatic
  Clone ID: LIB3229-005-P1-K1-A1
ggttaagttgagagtgacatatgtgccaccccctcagccgccctcgccggttcgtgagggttctgaggaggggtcgtcgccgagggctactttgtcggagaatgggaattcgtctaccactgattttggcactgaggcgaaattgactgcagagactcaagaaaaaccttcggagacaactgctctgatttcaaggttaactgaagagaaaaattctgctatccaacagaacaacaagcttcgacaggaactggaggtgttgaggcgggaagtcagtaagcagcagcagggcagcttctcattcatgtttgtggtgatcgtcgccttgcttgggatccttctaggttacatcgtgaagacttgaataacgttttggggcattaacctactttgccagcccacccgtggcaa

SEQ ID NO: 260 - DNA, 396 bp, Lilium asiatic
  Clone ID: LIB3229-005-P1-K1-A12
ggccgtgcaggtgctaagggcatggccttgaccttctttactcaatcaaatgcgaggttttctagggaacttgtcaagatcctacaggaagctgggcagattgtgagtccagcattggctgcaatgagcagatcttctggtggcatgggttccggagggaatttccggtcaaggggtcgtggaggaggtagagggggagggcgaggagggtttgttcaccgatctgggtccaatgtgatcccacttggtgggaaaagagcttggtgatcatttcttggtctattatatgtagggagttcatattttctttccagttgctactctctgaattgatgggtttcttcattattgttagacataacactctgcaatattgataacctgtttttaaatttt

SEQ ID NO: 261 - DNA, 355 bp, Lilium asiatic
  Clone ID: LIB3229-005-P1-K1-A2
gacgccggaaggtgaggtgaatttgctgatgcagcaggtggcggatcagcacgggctggaggtgtcggttgacctgccgcaggcgtccgcgcatgcgattccggcgcgggagaaggagaaggtggatgaggatgatctgtctcgccgccttgctgagctcaaggcccgcggttaggtgattggtatatagagtttatttatatattgggctgttaaaactttttatattgtgttgatatcttcgtatgatatgggtctttgggaccttgaattctaaatacttgtgcttgtgcccgttgatggaagtatgcttttgtgaattgctatgtgatatttctttctttcatttactttt

SEQ ID NO: 262 - DNA, 402 bp, Lilium asiatic
  Clone ID: LIB3229-005-P1-K1-A3
gttcctcttgctcaagccaacgaagctatgggaacgaccaccgaagaaaacgtgctgagagccaaagttcgccctgctgcttgaattttttcttttccttgtccatcaagtagatgaagattgaacttactgacagagatggaggagcttttgatggtcgctttggtcgcctaacatagatacccaaattatgtgagatatccatttcttttgctagaagactgatgggggattctgatcaactttagtatgtgttacatgagctgagagactgattcctgcttctaccttaccttacatcgtattatatgaaacaatttactaactactaagatcatgatctagaagatatttaatacatgtatctggactttacattgtattatatgaaacaaattactg

SEQ ID NO: 263 - DNA, 404 bp, Lilium asiatic
  Clone ID: LIB3229-005-P1-K1-A5
ctctttcgattattctcttgggcaaaacctagaggtaaggactccggagataatgtcacatcttactccatcgataactgaagtcaatgaatctgaattcctggaagatgcttcccctgcaaagaaactgattgaagaagagaaaaatgcagtgacagacggagacgccgcagcgaaactctctgaggagctctctctgtttgaatcatacatgaaattcatggatatcccatatcttgaagggaatttaagtgagtcgatggacagtctcttaggaaatgatgtaactcatgatggggcgagtcaggtggagctgtggagctttgatgacatgcctgctactgtctgttgaggtaagtgttctgctctttatgtagataaggattaaacataagttggtatct

SEQ ID NO: 264 - DNA, 205 bp, Lilium asiatic
  Clone ID: LIB3229-005-P1-K1-A6
cccactcgtccggctagatgacctactggaaatcactcagagccagtcgcagaaagattatgggaacatggagggcacccttttaaatgcaatgaagttactgtctaaggtgtttctgcagctactgcaagagctgtctggactgagctgcttctgcaagctatggctgggtgtccttagtcgcatggagaattttatgaaggtt

SEQ ID NO: 265 - DNA, 373 bp, Lilium asiatic
  Clone ID: LIB3229-005-P1-K1-A7
acgcgtgcgagcatgcgttatgttagatgacctactggaaatcactcagagccgggcgcagaaagattatcggaacatggagggcacccttttaaatgcaatgaagttactgtctaaggtgtttctgcagctactgcaagagctgtctggactgagcagcttctgcaagctatggctgggggtccttagtcgcatggagaagtatatgaaggtcagggtaagagggaaaaagagcgagaaactgcatgagttaatcctggagctcttggagaacacacttctggctatgaaatcaaaggggattcttgcaaaaaggagcacgataggtggagatagtttatgggaactgacgtggcttcatgtgaacaacatt

SEQ ID NO: 266 - DNA, 400 bp, Lilium asiatic
  Clone ID: LIB3229-005-P1-K1-A8
gactctttcgctcaagccaacgaatgctatggcaactgccaccgaatcaaacccggtgggagccagagtttggcctcatgcttggaattcttctttttcctgggcaatcacggaattgaaaattgaactaactgccaaaaatgggggagctctgatgggcgctttggtgcgcttacatagattcccaaattatgtgggaaattcatttcttttgctagaaagatggagggggattctgatccaccttaggttgtgttacatgagctgaaagactgatttctggttttaccttaccttagattgtattatatgaagcaccctactaactccgaaagtcatgtgctacaagatattttatacatgtatctcgacttttcattgtgtgatatgaaacacttta

SEQ ID NO: 267 - DNA, 405 bp, Lilium asiatic
  Clone ID: LIB3229-005-P1-K1-A9
gttcctcttgctcaagccaacgaagctatgggaacgaccccccgaaaaaacgtgcggggagcccaaattttccccgcttcttgaattttttcttttccttgtccatcaagtagatgaagattgaacttactgacagagatggaggagcttttgatggtcgctttggtcgccttacatatatacccaaattatgtgagatatccatttcttttgctagaagactgatgggggattctgatcaactttagtatgtgttacatgagctgagagactgattactgcttctaccttaccttacatcgtattatatgaaacaatttactaactactaagatcatgatctagaagatatttaatacatgtttctggactttacattgtattatatgaaacaatttactgact

SEQ ID NO: 268 - DNA, 403 bp, Lilium asiatic
  Clone ID: LIB3229-005-P1-K1-B2
atggagcccccgaggatgagaaccgtcatgctggcgaccttggaaatgtgactgtcggtgaagatggtaaggttacctttaccattgttgacagccagattccactctctggacctaattccattattggaagagctgttgttgtccatgccgatcctgatgatcttggaaagggtggacatgagcttagcctgaccactggaaatgctggaggaagaattgcatgtggcattattggtcttcaagcttgagttacctatccagtgtcgagagtgtgagtcgtatcaagcatgagttacctatccagttatcttcccatctctagattgcaagtctcctgaataaataaaccagtgttgtagctgctggcacatgttaaggtcatttgcaaacagaactccag

SEQ ID NO: 269 - DNA, 406 bp, Lilium asiatic
  Clone ID: LIB3229-005-P1-K1-B3
cttgatcctctagctgacaaggttttgattggttgtgttgctgtagctatggtagaaaaaggccttttacaccctggactggtgggcctggttgtgttgagagatgtgggtcttgttggtggtgtgatttatagaagagcttctagcctggggtggaagtggaaagattggtccaattttgtcaaccttgatggaactcatcgagagaaggtggaacctcttcttattagcaaggtcaatacagtcttccaattgcttttagttgctgctgctcttctgcaacccgagtttggcactgaatatacccagttgtacataaactacttgagttggctagtagcttcaacaacaatagcatctgcagtcggatatggagcacacctttggcggtttaattgaagcagtt

SEQ ID NO: 270 - DNA, 395 bp, Lilium asiatic
  unsure (1)..(395): unsure at all n locations
  Clone ID: LIB3229-005-P1-K1-B4
gctcatccctggcacaagatcttccataagagaatgccacctgaggctgtggatctggtctctagacttctccagtactcccctaatctgcgaagtactgctttggaggcattgattcatccattctttgacgagctccgtgacccgaatgcccgtctaccgaatggacggttccttcccccactgtttaacttcaagcctcacgagttgaaaggagtacaaatggagatcatatntaagttgattccagaacatgcgaggaagcaatgtgccttcctaggactgtgagtgagtcccagcttggatgtttgtacctatgaaccagctatgtgtatctncaacctaggaaattagtatggtccagtgagtttgcagagcgcttaaagctgtgtttt

SEQ ID NO: 271 - DNA, 218 bp, Lilium asiatic
  Clone ID: LIB3229-005-P1-K1-B6
tgaacttctggcttcatgatatcccaaaatatccaccaataccactcatggccagggacatggtaagtttcaatttgtccatcccaaataactagttgatcacatggacccctcaatatatcattgcaattgtaagtattaaataacgaatccctgttagagttcaaataaaaacaaaaaataaagggctgccgttcatagaggatccaagcttactt

SEQ ID NO: 272 - DNA, 383 bp, Lilium asiatic
  Clone ID: LIB3229-005-P1-K1-B7
cccacgcgtccgctgatttgtgttttgggtgtctgaaggtgctggagctggctggcaatgctgccaaggtcaacaagaagtatcggatcataccgagacacgtttgacttgctgtaaggatacgaccaagcagctgggcaagctgctcgatggagttaccatctcacatggcggtgtcatgcccaacataaacccggtcctgctgcacaagaagacttttgagacgggtgattatgctgcaacaaaatctcccaagaagactcccaagtctccgaagaaagtcaccaagaccccaaagaaagcttaaggtccagtacgtggtgaatctgatttagagctatttgattgtaaaattgaaaaggggtgttaatgagtttctgtac

SEQ ID NO: 273 - DNA, 427 bp, Lilium asiatic
  Clone ID: LIB3229-005-P1-K1-B8
tggggggagccacgcgtccgatggagcccccgaggatgagaaccgtcatgctggctaccttggaaatgtgactgggggtgaaggtggttttgttacctttaccattgttgacagccagattccactctctggacctaattccattattggaagagctgttgttgtccatgccgatcctgatgatcttggaaagggtggacatgagcttagcctgaccactggaaatgctggaggaagaattgcatgtggcattattggtcttcaagcttgagttacctatccagtgtctagagtgtgagtcgtatcaagcatgagttacctatccagttatcttcccatctctagattgcaagtctcctgaataaataaaccagtgttgtagctgctggcacatgttaaggtcatttgcaaacagaactccagtttt

SEQ ID NO: 274 - DNA, 403 bp, Lilium asiatic
  Clone ID: LIB3229-005-P1-K1-B9
cagacattccagtgatagtcttcgtaggaaggctagaggagcagaaaggctcagacattctcgctgcagcaattccagatttcattgatgagaatgtgcagataataattctcggaaccggcaagaaaatctttgaaaaacaggtcgaagaaatagaagagaagtacccggacaaggcgagaggaattgcgaaattcaatattcccttagctcatatgatgatggctggaggtgatcttatcatagttcctagtagatttgagccatgtgggcttattcaacttgaaggcatgcaatatgggatgccggtcatttgttcgaccacaggtggtcttgtagacacagtcaaggaaggattcactggattccacatgggcgccttcactgttaattgtgaagctat

SEQ ID NO: 275 - DNA, 268 bp, Lilium asiatic
  Clone ID: LIB3229-005-P1-K1-C10
cgtgcgggagaggctcaagtatctggagttcgtccacgtcgccgccgccacggcggtgatgtacatcatggggatctacggtttctccaaggagaactccaccccgctgaagcccggcgtccagaccgtcgaggtcaccgttaagtccgtcgtcctccctgtttacgacaagctccacgacgtccccttcgagatccttaggttcgtcgttcacaaggatgatgaagctgcacatcagctggataagcatgtgcgcgtagcggtgagg

SEQ ID NO: 276 - DNA, 97 bp, Lilium asiatic
  Clone ID: LIB3229-005-P1-K1-C12
ttttctagatcgcggtcgaccgctctagatgatcctagtcttacgtacgcttgcatgcggcgtggtggctattttatagtttcacctaaattcaatt

SEQ ID NO: 277 - DNA, 217 bp, Lilium asiatic
  Clone ID: LIB3229-005-P1-K1-C4
tcgggagaggcttaaggatttggagttcgttcacgttgccggcgccacgggggggaaggacacaaggggcatttacggtgtttccaaggagaactccggcccgcttaagcccggggttcagaccgttgaggacaccgtttagtgcgtcgtttggcctgtgtacacacaaaggttacaacgttccctttgagatactcaaattcggggatcacaaagg

SEQ ID NO: 278 - DNA, 73 bp, Lilium asiatic
  Clone ID: LIB3229-005-P1-K1-C7
tctatattatccaatcttacatacgcttgcatgggacgggagagcttttttatattttcacctaaatccaatc

SEQ ID NO: 279 - DNA, 366 bp, Lilium asiatic
  Clone ID: LIB3229-005-P1-K1-C9
tatttctcagttctctggttttgtttgggctgggaacgaggaaaaacagagggtgcgggttaaggaaaagcttgataagtgtacaaaagacaggttgcttgatttttctgacctgcttgacatccaaatagcgagaactactgctaagaaggaagaaatcactgaaagattactagaatttttggtgtctcctcatgttacaagagatgttgtacttactgagagtgagaagaaaggaaaacgcaagagggccaaagcagttggccaatatgcaaccacaggagcatcttcagaaggagaagcaaagaaacttaagagcagcctgaagactgagggaaaaaagaggaggagacgatcggataaaat

SEQ ID NO: 280 - DNA, 392 bp, Lilium asiatic
  Clone ID: LIB3229-005-P1-K1-D1
tatttttgaaaacagtctttaaagatgtcttacaaggcttgaaacaacaaaagcgtgagttactaggtagagaaattgagttcaaccaaaaaagggaggtggagctttaaagtgacaacatgtacctgaaagctaagatctactggtatgagcgaactaataactgtatgattcatagaatgtctggtttctactcatgttacaacgttatgttgcacttactgatagcgagtaaaaaggataatggaggctccaccccactttcatcattaggatcagacagcccttcattttggcttcgaagccaaagacgattcaattccatgaaatttaagagggtgttctagtcatattaattccacttaagtttgtgttgtaccttttgaaatttt

SEQ ID NO: 281 - DNA, 365 bp, Lilium asiatic
  Clone ID: LIB3229-005-P1-K1-D12
ggcatcaccaagccggcgatcaggcggctggcacggcgcggcggcgtgaagaggatcagcgggctcatctacgaggagaccagaggagtgctgaagatatttttggagaatgtgatccgtgatgctgtcacctacacggagcacgcacgccggaagacagtgacggcgatggatgttgtgtatgctctcaagcgccagggtcgcaccctgtacgggttcggaggctgatcttcttctgcactgtgatcgattgtgggggtatcgcttgttgttaggggttgatcttgttttcttatgtgagcttttgttagatcatgtttttaagtatgaaatgcaatttatcttttgcatcaaaaaaaaaacaa

SEQ ID NO: 282 - DNA, 406 bp, Lilium asiatic
  Clone ID: LIB3229-005-P1-K1-D2
gatgtgagggatctacgtttaaacaaatacacccaagtatggtgagtcatcaaggaaactaacagagtatagagagttacaccatgaagaacaaagtgggggacatcaaatatctgaatgggctaattcaaaaggatagttagacacattggttgcaaatggtagagcaaagaacttgacctatttgcaactaatgcacccagataaagtggaaggagacaacttcaccaagagcacctgaaagaagtaggctgttaaaatagacctgatatgtcatattcttatgctacatgctggcctaaaaagaagattcactgccaacatgagaaacaagggctcgaaatgcaaaatcttgaacatgaagaaactgcaaatgataccatccatttctcctactacaagcccc

SEQ ID NO: 283 - DNA, 404 bp, Lilium asiatic
  Clone ID: LIB3229-005-P1-K1-D4
ctcttgggtaaccgggactatgttgcggggcagatatctgatttggctgagaagttggagcaggctgaaaatcagcttgctactacacgcatgggttcttcttccttttcatcctcacggaagaaagaggagtctcagcttgcaaagataacccgtgatagctcaaaaattacagtggagcaagtacatggtctcatgtcgcaggtcatcaaggataccttattcaattctgtgcgtcagtccagccgggcatgctcgtgctcagcagactctggtcctgaacctatggttgaagcttgatggggctgcagagagttctaggaacctagggtcagtgtttgacagttaataatatttgaaatttctatcaagttagatgtaattgtatctgagacttagtttca

SEQ ID NO: 284 - DNA, 202 bp, Lilium asiatic
  Clone ID: LIB3229-005-P1-K1-D8
cccacgcgtccggggagatgcatacggcggcggccgaggcggtgagggagggagggtcgtcgtttagtgcattggatggggttgttgcaaaatggaaggggtttagggcagtgtagaaatggagagaagggtagcttgtcgtttcttactgtatagccaaaattctctatcctccaaataaaatctcagctcattttctaaa

SEQ ID NO: 285 - DNA, 298 bp, Lilium asiatic
  Clone ID: LIB3229-005-P1-K1-E1
gtgatctgcaattttttgtgggtgagagcatgcaggatgacagtagccttgtgtttgcttattaaaaggaaggtgctactgatccaacctttttgtacttcgcgtacggattgaaggagatcaagtgctagacttgaaaaatggcagcatatgggaaaaatagtttagtttactagtttgcttgttgtgctctatggatgttgtgatattatgcttggtttttatccgttactgtgtactggttcaataagaacttttttgtactgctgagattaagttttatttataatttggtttt

SEQ ID NO: 286 - DNA, 170 bp, Lilium asiatic
  Clone ID: LIB3229-005-P1-K1-E12
gtgaatgcgttgtcgaagcagagggctatgctggagaacatcatgagggcttgcatcggtttggcgccggagaacaacatgatcttagagtacaagtgagatgagctcaaccgagttgggaggggttggggaaagtttaggagaggggttggggaaagttaacgtaggat

SEQ ID NO: 287 - DNA, 404 bp, Lilium asiatic
  Clone ID: LIB3229-005-P1-K1-E2
cagttccatcagcatctggctgagcagctagaaatggatttgtcggcccttcagtatatgatgaaggaataccctgggatcgaggaggagaagatgagggctgtggttggtcgatttggattgacaggaaaagcccaggtgatgccgatgaagaacttgtctgacggccagaggagtagggtgattttcgcttggcttgcctggaggcagccgcagttgctattgcttgatgagccgactaaccatcttgacattgagactattgattcattggctgaggctttgaacgagtgggatggtgggttggtgttggtgagccatgactttcggttgattaatcaggtggcgaaggagatctgggtctgtgagaatcagactgtgactcggtgggagggtgatattat

SEQ ID NO: 288 - DNA, 252 bp, Lilium asiatic
  Clone ID: LIB3229-005-P1-K1-E4
cgacccacgcgtccgacacattcaaatggggagtagccaaccgaggggcttctatcctagtaggccgtgggctgagagaggaatgatcatctactaggagaccacaagagtgctgtttaacatggatccctacattgtcacctcgatgatcgctgagaccacccttcttagatgccaacttaagtgtgtctgccatactacgattattcgcggattgtgtgttagttcgtggaatagcatgcatcggacagg

SEQ ID NO: 289 - DNA, 286 bp, Lilium asiatic
  Clone ID: LIB3229-005-P1-K1-E7
aaaaaaaaaaaaaaaaaaaaaaaaaaaaaaaaaaaaaaaaaaaaaaaaaaaaaaaggggaaaaaaaaaaaatttaaaaaaaaaaaaaaaaaaaaaaaaaaaaaaaaaaaaaaaaaaaaaaaagggggcgccccttttatagaatccaagtttactcccccttactttcaacgtataagctttttattggggtccccaaaattaaattcattgcccgttttttaaaaacctctaacctggaaaacccctggttttcccaaattaaatcaccttgaataaaatcccct

SEQ ID NO: 290 - DNA, 381 bp, Lilium asiatic
  Clone ID: LIB3229-005-P1-K1-E8
cggacgcgtggggtgctctcggatctataagtacccctcctcccccatcggaatgaaaaaaaagaggtctcactccggcccgagtgggggagggcacattgttggccgtctttctctcggtttcggaggaggcacattgggagagcatctacaagtgattttggagtggagagttcatcatggttcttgtttatgggtctttgttgagctttgagagagtcatgtaagtggaatttgttaggtttgtgtcttgttttatgatgagtttttggtacgtattttgtttacattcaatgatgtcctttgccttatattgttgattttgatttctcttgtgttcgatctttacttttgtagttgttatttactgctatctttttt

SEQ ID NO: 291 - DNA, 406 bp, Lilium asiatic
  Clone ID: LIB3229-005-P1-K1-F1
cccacgcgtccgattttcttcggattacttgctatggaactcaggcttatactaacgaaagactttagtggctaactcggtcacccaaccagtccagcgatgcataagattatagtgcatttccagttttggttgagtgagtaagagaagctcatacccattaccatctctaaaagggaagcgggttttcacacctggagcaggatggcgtacggaccagtcttggctttttggattatattctgtccacgccactacagagtgagcccaagtactggaagactgtctgctacctatgctcttaaaggagacggacaaccactagtgtggggaaccctcttggtttggagaaagtcaaggttttttttcttccaagaatcacaaaaggcaaaatgccctgtaaatg

SEQ ID NO: 292 - DNA, 234 bp, Lilium asiatic
  Clone ID: LIB3229-005-P1-K1-F10
atatccttattttaactcatattgagctgaagagatggcacccaaggggagagcgggagcttctatcgttcataagaacgccgcacggaaaaagtcggtcccataatcaatgaagactggcactccatctccctgtaggcacgtatgcccagctacctcaataaaggccactatgcaaagcataaaggtactggagctcctgtctacctagcctccatgctcgagtactcatgc

SEQ ID NO: 293 - DNA, 388 bp, Lilium asiatic
  Clone ID: LIB3229-005-P1-K1-F12
attttttatccatgttattatttaccccttattttatggttttctcatgttagaatgatcttgtttcttgttatacaaaataaatctttctgccaattatttttccaaagggtaaaaaataatattttaatattaattattccctttctatccaaaattaaatatttatcttgttttctcaaccatgtcagactatatatagaataatattttgtccctatctatcatcataatccatcaaccatcttatccaccaataatctagttttagcaaagatggattctaacaaaaaaaactcaaggcataagaagttttactataattttaatattttgaccaaatagtagtattataaattaatatgaatacaaaatggaggttcttcat

SEQ ID NO: 294 - DNA, 134 bp, Lilium asiatic
  unsure (1)..(134): unsure at all n locations
  Clone ID: LIB3229-005-P1-K1-F2
gaantttgggggggcgccacgcgnncncccacccctccgatattcttcaaattacttgctatataactcangctaaaacgaagaaaagggttnattttctaattcttacacccaaccaaaccaaatatacataa

SEQ ID NO: 295 - DNA, 406 bp, Lilium asiatic
  unsure (1)..(406): unsure at all n locations
  Clone ID: LIB3229-005-P1-K1-F4
cggacgcgtgggtccttcagtcccaactcgtcagcgatgtcagggcgcggcaagggcggaaaggggctcggaaagggcggagcgaagcggcaccggaaggtcctccgcgacaacatccagggcatcaccaagccggccatccgccgtctggcccgccgtggcggcgtgaagcgcatcagcggcctcatctacgaggagacccggggggtgctgaagatctttctcgagaatgtcatccgcgatgcggtcacctacactgagcatgctcgccggaagacggtcactgccatggacgtcgtctatgcactcaagcgccagggtcgcaccctttacggcttcggcggctgatctatctatctatctagggtttttcttgttgggattatggatcggaacttgngatttt

SEQ ID NO: 296 - DNA, 365 bp, Lilium asiatic
  Clone ID: LIB3229-005-P1-K1-F6
ttcctagatggagcgcggtggttatagaagatccaggggtgctttcgcttgcgtgcgaattcctacctatcctatagatatagctaatggcaatctacgtgaccccggttctacaacttgctgtctgtgactaccctgagatcgcctattcttaacagcctagatagccttcagacatgggataggtgaggctatagataacaggcccgcacgatatggcactgggaccaggtcaagagaccgaatggaacatggtactctccctgatgccctgaataaatacaccgtgctgtggtattcacacacatggtgaccaattctcttgtccatggattaccaacggatgcggaacttgaggtctgtaa

SEQ ID NO: 297 - DNA, 397 bp, Lilium asiatic
  Clone ID: LIB3229-005-P1-K1-F7
cccacgcgtccgcatctatttgcgtcagaggtcctagacacgtaaccggtcaagggatcattttaccaccttctgtggaaatagtggacacgacacagcatatagctaacctgacggaaccaattgatttgtgtattgaattacaaatcaatagggatcgcggatatcgtatgaaacccacaaataactctcaagatggaagttaccctatagatgccatattcatgcctattcgaaatgcaaatcatagtattcattcttatggggatggaaatgaaaaacaagagatactttttctagaaatatggacaaacgggagtttaactcctaaggaagcactttatgaagcttctcgtaatttgattgatttatttattccctttctacatgcggaggt

SEQ ID NO: 298 - DNA, 231 bp, Lilium asiatic
  Clone ID: LIB3229-005-P1-K1-F9
attgcctcatttcaactcagagcgagctgacgagatggcatctggaaagatagccaaagctgctgccggccgcaagggcggcgcacggaagaagtcggtcccaagatcaatcaaggctggactccaactagcgggaggccgcattggccagtacctcaagaagggcctctatgcaaagcgtgtaggttctggagctcctgtataccttgccgccgggctcgagtaccttgc

SEQ ID NO: 299 - DNA, 405 bp, Lilium asiatic
  Clone ID: LIB3229-005-P1-K1-G1
gtggcctttaacatgaggtctctgttggatgatgagcctgagaagtttaaaactaacttttttgaattaataaagagggggatggatccggttcaaatggaggagatgtccaagagggtccttgctgttatccgggaagatccgccattagtcaagtccaccaagccaccaccaaaggagcacaggaggtccaattggaagaacctgccctatgaggagaggaaggctagcctggtcaagcgttggaatgccctcaatgttgccaccaatgatgaaaatgatgaggatgatgattgaaccttttgtaaaaccgactttaaattcatagtttgtctggagagttgaacttggtatctttgcgtttttatgttatgttggcaagttgtgttggtaacttggttctgc

SEQ ID NO: 300 - DNA, 407 bp, Lilium asiatic
  Clone ID: LIB3229-005-P1-K1-G10
gtggaggtcgtggcggtggccgttctcgtgaccgtggcagcgaccgcggaagtgaccgtggaggttcagaaatgaaatgttacgagtgtggtgagcctggtcactttgctcgtgaatgccgcatgcgtattggttctggaggacaaggcagtggccgtcgccgtagccgcagccgcagccctcgctatcgaaggagtccaagttatggtcggcggagcccgagccctcgtgaacgttctccaagaactcgcaagagctacagtcgtgaccgctctcccagaagccgcagtgtgtcacctcgcaggcgcagctatagcaagtcacctgctcgaggtcgtgatgaaccagcaaatggtaacggaagttctgctgtcaaagagactcgtcggagcatgagttgaagtacc

SEQ ID NO: 301 - DNA, 326 bp, Lilium asiatic
  Clone ID: LIB3229-005-P1-K1-G2
agtcgtcggagggctccctgctgtaggcggtcttcctgctgtaggaggagggctgccggctgtaagcggagggctcccagctgtaggcgctcttcctgctgtaggagggctccctgctgttggtggtcttcctgctgtagttgtagggatccctgctgtaagcggagggctccctgctgtaggcgctcttcctgcactgcccggtataggcggaggggtagtttccggcaacaagccatgatggaatgtagaagaatggcttctacgatgaagctgtctcgcttggcatagtgaatgatatattgctgtagtgaaagatatattgc

SEQ ID NO: 302 - DNA, 161 bp, Lilium asiatic
  unsure (1)..(161): unsure at all n locations
  Clone ID: LIB3229-005-P1-K1-G5
ggggggctccacgcgtccggngcccgcataaccaaaaagggagggttttccccttatcaactacaggtcatatggggcaggcggcaattcattatttcttgatcaaatgcagcgctatgagattttgttgtaagatttaaagactgaactaattaattgtt

SEQ ID NO: 303 - DNA, 197 bp, Lilium asiatic
  Clone ID: LIB3229-005-P1-K1-G7
attcatcgccgactagtccgtcggagtcgttagtccctccttgacgaagtgccgatttaacttttgtacttcaaaaaaggattttccaacccgcgatcagttgattcttactattgaggttactcccacattaattaggccaacataaatttttacatgaggatactccaccaacaacatgtttgttttaagtcgaa

SEQ ID NO: 304 - DNA, 394 bp, Lilium asiatic
  Clone ID: LIB3229-005-P1-K1-G9
gttcgtagggcactctgcaagctcaaaggggtgacttgcattgaaatagatgtgctgttgaacaagattacagttttgggctatgtcgatagcaatttggttctgaagacggtccgaaaaactggtaggcgagcagatttatggttgtcctgccaaccctgtgccccggacactggaaagaggacaattctggcttcgccgaggttggagctaagaaaatgtatgagtttgtgtttgaactccacgagatgggccactgactaatcaaactgtgattaaccaagtgattccaagaagaatgtttgtaaataaataaataataccaataattgcaatttatctttaaatttatagttttttaactaaaaaaaaaaaaaaaaaaaaaaataagggc

SEQ ID NO: 305 - DNA, 234 bp, Lilium asiatic
  Clone ID: LIB3229-005-P1-K1-H10
gggcggcccacgcgtacagagggagttataacatctgtcagagatcatgcaagtcattacctggggtcacaagcgcctttatcttattatcccctgtacctcgaatcaggcaccgtaggcagcttaaaagcttgaaagagaatgctaaatgggtcacgtactcatctgatgcgactctgctgaagctgcttgcacttcatatgattaccaagactgcaatcattctctggaacg

SEQ ID NO: 306 - DNA, 393 bp, Lilium asiatic
  Clone ID: LIB3229-005-P1-K1-H4
ggcaacagtgtcggagatatggtttgtggaggaatatgatgtcctggccctggccctaaatggaagaatgaaagcacgtagattccatcttgattgcaatggaaattaacaaaatcaaaatattaatttcttaagactgttgattttattttcatagtgttttgtttaagccaatcgaatcaaaagcctaaacaacttcagtggaagatgcataagaaggcgagcaaagaaactagttttccatgaaaagaaattattacaactctgcactgaaaaactgccacattgagtgacggttacccgtacttcatttatttagttccaggaattacctcttgatgggtcaatttgctgcttctgctcataaataaatccttaagatctgcaactttt

SEQ ID NO: 307 - DNA, 416 bp, Lilium asiatic
  Clone ID: LIB3229-005-P1-K1-H5
gtcaaaaggcgatgcatgagaaaagggcaaagcaacaccactttcagagacagattgtggaggttaagacaaccattgccgttgatgagaaccaggatggtgcaaccggtaaaccaagattgcagaagccattggagaaggttacagttgcgaagaaagaacctgtgcaggttggcctctcagagaggaaggcatctgatgaaaatacggtcgcagtggtagctggcaacccaccgaaggtctcaaggccagtacctgagaagcatattcttacaaatggtgtcgccaatggttgttaaggcagcaacggtagcaagatttagagaggggggtcacataggggggaataaaggtcttgctaaggtagttgtggtaatgtattttggtttatctttttatcgttttctgtgtttgag

SEQ ID NO: 308 - DNA, 191 bp, Lilium asiatic
  Clone ID: LIB3229-005-P1-K1-H6
gtcaaatggagacgcacgtgaaaagggcatatcaacaccactttagagacagattgtggaggttaagacaaccattgtcgttgatgagaacagatgggcaacctaaaccaagattgcagaagccattgagaagtacagtgctaaaaagaacctgtcaggtggtctctataaggaaggctttgttaaaatac

SEQ ID NO: 309 - DNA, 242 bp, Lilium asiatic
  Clone ID: LIB3229-005-P1-K1-H8
gcaggccggcaattcacagtcagagatcatgtaagtcattacctgatcgttaaccgcagcatcagcagcaacccctgcgggtcgatcagcaccggaggcgctgaaagctgaggggaatctaaatgggacgtgtctcgttggggggtgctgctgagctgttgcttgcggttgtttatttttctgaagttttcttttttttttttttgtttttttttttaatttttttttattttttttttttt

SEQ ID NO: 310 - DNA, 334 bp, Lilium asiatic
  Clone ID: LIB3229-006-P1-K1-B2
ccaatgggatccaagtcagaagccacatgcaagggttttgtttcggttttgttgagtttgaggatgccagttctgttcaaactgcaatagaggcttcacctataacgattggtggacgcccagcttatgttgaggagaagcgccctgctgtttcacgaggtggcaacagaggaaggtttttacctgctagaggtgggtactggaatgacggtgtgagaggacgtggtggctttggtgggaggggttatgggaggtcagactacggtcatcggttcgatattagtggccgaggtgttggtagaggtggagtgtccaaccgtggtggtggtgaggg

SEQ ID NO: 311 - DNA, 402 bp, Lilium asiatic
  Clone ID: LIB3229-006-P1-K1-B3
gtatcaagcactttggcaccatattcaatactatagcgatcgccagtcctatggggtcttatatattatctgtgcgagttgtgggttacatatatgatggtgaagcagcttcagaaggcacactagtgtgcaccggtagacactgcttcatgctctcgtttctgattatggtatgtgtgacgctttttgggtctgtggtcgccttggtactatttttgaggacaaggaagttttacagggaggtcatatttgtgagactgcaggcgagaagcttaaaatgaggtgcgggattttcagggttgttcttggggctcttgtagttttcagtatggattgtgctatcatctagtttttttctctgtattgttagcacaactgcggtggatcgtggatcaccattct

SEQ ID NO: 312 - DNA, 398 bp, Lilium asiatic
  Clone ID: LIB3229-006-P1-K1-B4
gccacgcgtccggcgccattgctcgagctgggcttcagtacgggaacggcaaggtcatcatcaattatcgggatgctaaggagtttcttcagggcaatcctttatggcatgcagtttgccaagactccattgctgaccttgctgtatgaaagcacctatcatgttttcgttaaagcacatggcggtagcctcgcaagccaagctcacgcaattaatcttggaataggtgactcatctcctcataattagggagaaccatatggtacctaatgatgaaggaaggccttctcactaggggatcctgggtggttgagaggaagaaagatggtcttaagaacgcccactaagcacctcaaatatcaaagcggttaaaagcatgtcggctattactgaatctt

SEQ ID NO: 313 - DNA, 400 bp, Lilium asiatic
  Clone ID: LIB3229-006-P1-K1-B8
cggacgcgtgggcggacgcgtgggttgccgccgcttcatcttcgtctccggcgatgactgtcgtcttgttcgcactcatggcctcggcggttctttccgatggggcggttttcaaggtcggcgataccgtcgggtggaccatcctcggcagccccaactacaccgcctgggcagccagcaaaactttcaccgtcggcgacaccgtcgtgttcgaatacaacaaggcattccataatgtcatggaagtgaataagacggactacaagggatgcaacacagcttcgccccgcgttacctacacaacaggcaacgacacgatcaaactgaagaggaagggccatcactacttcatttgtggcattcccggtcattgcagcctaggacagaaggttgacatcag

SEQ ID NO: 314 - DNA, 346 bp, Lilium asiatic
  Clone ID: LIB3229-006-P1-K1-C10
ggcgattccggcggggtttccggcggtgttggtggtggtgggaggatacgatcgggtgcaggattggctgcggcggtactacaaggggctgcgggagcacggggtggaggctacgctggtggaatttccggaggcgattcatgcgttttatgtgtttccggagctgccggattcggggaagctgatcgatgttgtgaaggagtttgtcgacagccgtaggactccggcggcggtggcggctgaagggagctgagaactggacaccacttgtactcaactggctggtgagctgtctaaactggtatggtagtgttgtctcagataggattaccttgaataaagttat

SEQ ID NO: 315 - DNA, 405 bp, Lilium asiatic
  Clone ID: LIB3229-006-P1-K1-C2
caagactggtgctcttctcctcgatggaaacacattgaactacttcggaaagaacattccgatcaacctcgttctcgctgtggttgcggaagtggtgctacttggaggagcggagtactatagactcacaaatgggctggatttggaggacaagcttcacccatgaggcccatttgatcccctgggcttggccaacgaccccgaccaagctgcattactcaaggtgaaggagatcaagaacgggcgcctggcgatgtttgcgatgctcggtttcttcctgcaggcctatgttacaggagaagggccagtggagaacctcagcaaacatctgagtgacccatttggaaacaacttgctcactgtgatctcaggaggggctgagagagttcctaccctgtaattttt

SEQ ID NO: 316 - DNA, 52 bp, Lilium asiatic
  Clone ID: LIB3229-006-P1-K1-C4
aaaaaaaaaaaaaaaaaaaaaaaaaaaaaaaaaaaaaaaaaaaaaaaaaaaa

SEQ ID NO: 317 - DNA, 127 bp, Lilium asiatic
  Clone ID: LIB3229-006-P1-K1-C5
aaaaaaaatcgaacaacaccctatatataacccctcaactcacacacacacacacgcaaacgtgttattcttttcttttttcacaccacaaacacaacacactccccctattaacaccacctctact

SEQ ID NO: 318 - DNA, 397 bp, Lilium asiatic
  Clone ID: LIB3229-006-P1-K1-C6
gtcgattttgggaaagagttttggtcctaaaggataaattgtacctttgttaggggacgggtgcacattacctgtagaagtgtgagttattccaccattaaaatccatagaaaggggaaataaggtcacgcattactgtataacttcataatagcattacgactttaaatacctgattgaataaactagaaccgatcttgtcagcctaaacatacaaatattgaaaactatctcatttaacatatgtcggttgactaagagtagggaattatatccatcacataaatgagccgtatttatacctacatcgataatattttacaaagttatattcaaaataactctagatttgttcacacctatagtcgggcttaagaactaagactagaaactgtct

SEQ ID NO: 319 - DNA, 369 bp, Lilium asiatic
  Clone ID: LIB3229-006-P1-K1-C7
aagactggtgctcttctcctcgatggaaacacattgaacttcttcggaaagagggtgccggggaacctctgtctttctgtggttgccgaagtggtgctacttggaggagcggtgttctatagactcacaaatgggctggatatggaggacaagctttacccaggaagcccatttgatcccctgggcttggccaacgacccctaccaagcggcattacttaaggtgattgagatcaaaaacggtcgcttggcgatatgtatgatgctcagtttctttctacaggcctatgttacagtgaaaggttctatgtagaaccttaacaatcattttatttacccactttgaaacaacttgtttactgtgatatca

SEQ ID NO: 320 - DNA, 397 bp, Lilium asiatic
  Clone ID: LIB3229-006-P1-K1-C8
gtcgatattgggaaagagttttggtcctaaaggataaattgtacctttgttagtcgactcatgcacattaccagtagaagtgtgagttattccaccattaaaatccatagaaaggggaaataaggtcacgcattactgtataactccataatagcattacgactttaaatacctgattgaataaactagaaccgatcttgtcagcctaaacatacaaatatcgaaaactatctcatttagcatatgtcggttgactaagagtagggaattatatccatcacataaatgagccgtattatacctacatcgataatatctaccaagttatattcaaaataactctagatttgttcacacctaaagtcgggcttaagaactaggactagaaactgtctta

SEQ ID NO: 321 - DNA, 317 bp, Lilium asiatic
  Clone ID: LIB3229-006-P1-K1-D10
attggcttaatctctacatagtgaagaacatcaccgaccagttggtgttgatggtatgactatacattccaaaagtgggatgattttaatcttctctcacatagacaacttcaataagcttgggtgagaatcggtgcattatgggttgaagacggaggaagtgaaaaagttaaactcaaatgaccattatctagtccaaggaggattagtgaggctcgggcgatgctgacccttcaaaggagaagtataccccatgagaaggtgacaatctcggtaggaggagagtcatttccacggaaaattgtttacgacatggg

SEQ ID NO: 322 - DNA, 401 bp, Lilium asiatic
  Clone ID: LIB3229-006-P1-K1-D2
catgaacaaaggaagcgagagatggttgtgttatggtggtgctgccggcatcgtccgttgccaggcgattggtttgccaaaattgccttgattgctggcttttaactgggtcatccgttccttgtaaagctggcacgccactgtttgacctctattataaactcagtagggtcctgtctggattgattctgttcacaacgaaacaggttatctcactaggagaggggtggaagacagactaggactgctttcgaagaagttaaaaaaggctcttaattctcagctgctggacacagagagctgaatacacatccgggagactggctttatctcgcaacagcctcctagctcattccctctccaccagaatatcctcaaagtcggggaacgatcactgctcc

SEQ ID NO: 323 - DNA, 402 bp, Lilium asiatic
  Clone ID: LIB3229-006-P1-K1-D3
cccacgcgtccgcccacgcgtccgcggacgcgtgggcagatattgaaaaacagtacacaggtaatagatagacacgtagagacaaccatcaaagataatcaaccagcaagtcaatcagcgaaccggcaaacctgtatacattatgattatgcactacatatttttattaacctgcacccgatttgattaaattatacattgcacagtctggttaaactgtatatacatttgcgagtaattctgatatctataggataagacaggcccgaggatggtcacagctccaactgggacgatcgtaggccctctaggtaatcacatattcaataggcgtctaagacaaattacgtgtccaatggacgatcacaagcccatcagatgattacaggtccttcagggatg

SEQ ID NO: 324 - DNA, 408 bp, Lilium asiatic
  Clone ID: LIB3229-006-P1-K1-D4
ccccagtcccctctttccctctccaaattcctctgatggcgcccaagtccgagaagaagcccgcggagaagaagccggtggcggagaagcctgcggaggaggagaagaaagcggccccagccgagaagaagccggcggagaagaagcccaaggccgggaagaaggtcccggcggcatccaaggagggggagaagaagaagaagaggtcgaagaagtcggtggagacctacaagatctacatcttcaaggtgctgaagcaggtccaccccgacatcggaatctccagcaaggccatggggatcatgaacagcttcatcaacgacctcttcgagaagatggcacaggagtccgcccgccttgcccgttacaacaagaagaacaccatcaccttttgggagatccagacct

SEQ ID NO: 325 - DNA, 367 bp, Lilium asiatic
  Clone ID: LIB3229-006-P1-K1-D5
ccgcaaagtggttgtgggcaaaattggcaaatctctacatagtgaagaacatcaccaaccagttggtgttgatggaatgactatacattccaaaagtgggatgatattaatcttctctcacatagacaacttcaataagcttgggtgagaatcggtgcattatgggttgaagacggaggaagtgaaaaagtcaaactcaaatgaccatatcgagtccaaggaggatgagtgaggctcgggcgatgctgacccggcaaaggagaagaataccccatgagaaggtggcaatttcggtaggaggagagtcattccccggaaaaattgttttcgacatgggaagtacctcacatttggttgccctgagaac

SEQ ID NO: 326 - DNA, 346 bp, Lilium asiatic
  Clone ID: LIB3229-006-P1-K1-D6
gccagggcgctacgccaacccgaacttcagccccaggcgcatcatccagcagccccgctaaatggtgcaactgaagtatgatcaagattgatcgtgaatgtcctgctgtgttgttttgtatagtcctaagttgtagtaggtctttgtgttctagttagcttcagctccagtgttgttttatgttcatcagcactctttcccagtgttgtgttatgttcatcagcactcttccccgaagagaggaaacaaaaacaaatcaatgtaaagagtctttcaagcaggcttgtttgccaaatcaaaatcagagggatccatctttgattaaaaaaaaaaaaaaaataactat

SEQ ID NO: 327 - DNA, 385 bp, Lilium asiatic
  Clone ID: LIB3229-006-P1-K1-D7
gcgttcgcatgaacaaaggaagcgagacatggttgtttattcatggtgctgcccacatcatgcgatggggggcaatttgtttttcaaaatccccatgaaagctagctttcaacagggtcaaccgttcctactgaaacatgcacgccactgcccgacctatattattaacacaacatggtcctttccggattgatcctaatcacaacgaaacacgtaatcttactcatagagaactgtaagacatactaatactgcttgggaagaagtcaaaaaacgctctataaaactaactggctgacacagagagctcattcacatccgtcagactgcatttattctagcaacatcctcctagcttattctcttctcaccaaaaataatactt

SEQ ID NO: 328 - DNA, 398 bp, Lilium asiatic
  Clone ID: LIB3229-006-P1-K1-E1
cgactgcccgctcgacgatgtccccgtcgcggccggtgacttcccgccgcaagccgacgggttctgctgggccccgcagggattcaatgtcgcctccaactccattgtacaacttgatggttcctttgccgagtctgatgggtttaaagattcaggcacccggaaacggggaaggtctgaatctggcaatgtacctggatccaaagcttgtagggagaagatgaggagggacaagttgaatgataggttcgtggagctgggttccattctggatcctggaaagccacccaaaatggacaaagcagccatccttagtgatgctgcccgcatggtgactcagctaaggagtgaagcccaaaagctgaaggattcaaacgagagtctccaagagaaaatta

SEQ ID NO: 329 - DNA, 366 bp, Lilium asiatic
  Clone ID: LIB3229-006-P1-K1-E10
gggaacggtcatgttaagcactatttcagctttatgtacagctaaacaggctcggcttggggagatcgtgggtgttagagagtgttatataccttgatctcacaccgactaccatactcaatttaattctatatccaacttgccttgttggaaatagagtgttagaaataaatgtatatgaatgtatcatcattggttgatacattagaaggattaccacgcgtataagaccaaaattaatgcatgacagtataattattgattggttcaccaacacaatgtgaatattgctttgagattatgaacatctagatcctaagtataaaaaaagggggatacggtacagatgattatagattactacca

SEQ ID NO: 330 - DNA, 171 bp, Lilium asiatic
  Clone ID: LIB3229-006-P1-K1-E3
catgtacataggtagcctgagatggttgtgctttggtggttctgccggcataggggggggtcagtctattgttttgccaaaactaccattgaactgctatcttttaacagggtcatccgctactcgtttaagctggcacacctcttgttgacctactattataaacttata

SEQ ID NO: 331 - DNA, 109 bp, Lilium asiatic
  Clone ID: LIB3229-006-P1-K1-E5
acccgtccggggaccggtaatgtttgggacttttcgaggtttatgtccaactaaacaggttcggctggaaaaaatagtgggagaaatagagggttttatatgttgagct

SEQ ID NO: 332 - DNA, 309 bp, Lilium asiatic
  Clone ID: LIB3229-006-P1-K1-F10
gctaattaaagtaatgcttctcttacttcatatgcttgaaacataattactttaccactctcaacatgactttcccaacgtgttactcaaaatatttaaagttaatcctgtattatcttttagaatttaccaatatttttgtagactgggaaatagtgtatagatacattgtatgacaccaaaaaaatattttcctctaccacaacaatttgtaatattgcactcaaattaagaaagtgaaagccacatggcatgtaaaatgctctaggatttatatctaaaataatgtatagatacattgtatgacac

SEQ ID NO: 333 - DNA, 267 bp, Lilium asiatic
  Clone ID: LIB3229-006-P1-K1-F12
ggggggccttcgcttccgcggacgcgtggtctctattcatagagttaacgactagacgtacaacgggaaatggtggaattctcaattttttcacccacaaacacgcaaaaatacaaccatatactaataacaacaaccttcacactatatactacgaagcaaaggagctacaccctacatacacctaaaacaaaaataccccaaacatccataaatcaaatccaataaattaaacactaagctgacattaaaaccccaaacaaagat

SEQ ID NO: 334 - DNA, 402 bp, Lilium asiatic
  Clone ID: LIB3229-006-P1-K1-F2
cccacgcgtccgaaataagcaaggattctaacttgcttctcacgtaattcatttaaagcttgtaatcctattacatttaggattatgaattttaaatataattttaatttcttttagaattgttataaatagatttagggaaggtatagataattaagttgctcaagagaagacgccatccatggagatggaggaaggagcgatgattacgaaagtgttttcataagaaccatacaaactcacaaatcatatatgatatattttaagtttattatttatatgaactttatgatggttattggataggtatgggtgtatgaatcacctgactaacttaaattaaataacaagtccataaaaattaaacatcattctcttccctctctatctagatcaaattat

SEQ ID NO: 335 - DNA, 332 bp, Lilium asiatic
  Clone ID: LIB3229-006-P1-K1-F4
gcaggagagagatgaggctgttcgatccatggcccgtgctctacaggcgggaggggaacgggctctgccccttttctaaccggcttcgcgaatcaccggcgctctcatcaccaaggtcaccgccggccttactgtggaagacgcgaagaactcgcgctacgtgcaggagcacaagaggtaaattcccatgcttgatccgacacctgggctgctcatgagtcagctgcttgcttaaattcctgttttttctgtcttgtaaaaaataatgaccaatgtgtggtttctgaccattttctctgtgttttggatgataaatggagtatgacggtgca

SEQ ID NO: 336 - DNA, 309 bp, Lilium asiatic
  Clone ID: LIB3229-006-P1-K1-F5
gctaattaaagtaatgcttctcttacttcatatgcttgaaacataagtgcttttccactcttatcatgactttcccaacgtgttactcaaaatatctaaagttaatcctgtattatcttttagaatttaccaatatttttgtagactgggaaatagtgtatagatacattgtatgacaccaaaaaaatattttcctctaccacaacaatttgtaatattgcactcaaattaagaaagtgaaagccacatggcatgtaaaatgctctaggatttatatctaaaataatgtatatatacattgtatgacac

SEQ ID NO: 337 - DNA, 407 bp, Lilium asiatic
  Clone ID: LIB3229-006-P1-K1-F6
cctagttttcgaaacagctgagatggagaccggatccaaggccaagaagggcgccggcggacgcaagggcggtccaaaggctaaatcggtgagtcgttctgtaaaggccggacttcagtttcctgttggcaggattgggcggtacctcaagaagggtcgctatgctcagcgtgttggttcaggagctcctgtctaccttgctgccgtccttgagtatcttgctgctgaggttcttgaattggcgggcaatgcggcgagggacaataagaaaaatcgaattgtgcctcgacatgtgtgtttggcggtgagaaatgacgaggagcttgggaggttgttgggtggtgttaccattgcccatggcggagtcctccccaacatcaacccagtcttgctgccaaagaagaccg

SEQ ID NO: 338 - DNA, 401 bp, Lilium asiatic
  unsure (1)..(401): unsure at all n locations
  Clone ID: LIB3229-006-P1-K1-G10
ccacgcgtccggnttatttgaaaaaaataaaaatataacaaagcaaacataatggggtctttcagaacagtaataaataaaaacacacccttacccttaggcatcatgcacctagcaatcacggcccatatttcagtttccaccccaactatatatttttttaagttcaaaatagacccattataattaggaaggatctattatactaataaataaaccaatcatttacttggggccaatatccttgagaccgcatatctgctccttacccatagcatacatcacactcaccaccagatccttcccttcaccaaatccctctttgatttgggtaagcagggcatcatcagttggaagccttaggtcatcctttgtatggccattttcagtgagaaggctca

SEQ ID NO: 339 - DNA, 402 bp, Lilium asiatic
  Clone ID: LIB3229-006-P1-K1-G3
atccagattcataacagcgcatgcaaagaacacggccgctgcccctgccggaaagacggcacaagcgagcgcgactatcagtcaagaggaagcgttggagtgggtgaagaaggaccgacggaggctgcttcatgttgtttatcgcgtcggggacatggagaagacgattaaattttataccgagtgcttggggatgaagctgctgaggaaacgggacatcccggaggagagatacaccaatgcgttcctcgggtatgggcccgaggactcacattttgtcgtcgagctcacttataattattgagttgagaagtatgatattggaactggttttgggcattttggtattgcagttgaagatgtctttaagacggtggatcttgtaaaagctaaggggggaaa

SEQ ID NO: 340 - DNA, 290 bp, Lilium asiatic
  Clone ID: LIB3229-006-P1-K1-H2
ctcccatggcggtgtcatccccaacatcaacccggttctcctccccaaggggactcttgagaagggtgattctgctgcaacaaaatctcccaagaagactcccaagtctccaaagaaagctgccaaaaccccaaagaaagcttaaaagggcatcctgtaagctccagtaggaggtgaattcgaattagggcttttggattgtaaaattgagagggggagttagtgattttctgtactgggcggtcaggatttgctgcgtcttgcttttatacaatatatccagttgtctt

SEQ ID NO: 341 - DNA, 307 bp, Lilium asiatic
  Clone ID: LIB3229-006-P1-K1-H5
atctaatggcggcgatcccgagactccccatcgccatagcggtgctcatcttcgccatcgccctacctgccgcccaggcccaagctccggctccggcgccgaccagcgacggcacatcgatcgaccagggaatcgcctacgtgctgatgctggtggcgctggtgctgacttacctgattcatccattggatgcatcgtcgccgtacaagttgttctgatatttacattggagtagttgtgaaagtttgtgtttgtatctgggggtttgggttgggttgtaaattctgaaagtttgttttttaggatg

SEQ ID NO: 342 - DNA, 373 bp, Lilium asiatic
  Clone ID: LIB3229-007-P1-K1-A3
gcgtcaagggtttccatggcggccttcagcggcgacgaaaccgcccccttctttggcttcctcggtgccgccgcggcactcgtcttctcatgcatgggggcggcgtacgggacggctaagagcggcgtcggggtggcgtcgatgggagtgatgcggccggagctcgtcatgaagtcgatcgtgccggttgtcatggcgggagtgttggggatctatgggctcatcattgcggtcatcatcagtaccgggattaaccccaaggcgaagtcgtattatctttttgacggatatgcgcacctctcgtctgggctttcgtgcggtcttgctggtctggcttgtggtatggctatcggcatcgtcggcgatgctggag

SEQ ID NO: 343 - DNA, 346 bp, Lilium asiatic
  Clone ID: LIB3229-007-P1-K1-A4
cccacgcgtccgcccacgcgtccgttttgattacaagagtagaaaaaagaggaagtgctttaagaacaaagtacttgggggctctaacagtgacattgaccatcacatccagttaaatggtcaaaacactaatacaagcaagtcattctcttatccaaatccaaagtataaccgtcacactccggtgtttcagagagacgaatatgaagctgaggtgtcaaaactgttacccaataacaatcatgatagtgagaacactatgtggcctagaagaccgatcaagaatggaaagattcatcaagaacggactactcttgaaaatgacaatcccatccgggcaggcata

SEQ ID NO: 344 - DNA, 221 bp, Lilium asiatic
  Clone ID: LIB3229-007-P1-K1-A5
cccacgcgtccgtccacgcttacgatattaatacaagagtagaaaaaagaggaagtgcggtaataacaaaagtcttgggggccttaacagcgacatagaccatcacatccagttaaatggtcaaaacactttatacaagcaagtcattctcttatccatatccaaatataaccgttacacttcggtgtttcagagagaccaatttgtatcttacgtgtcaa

SEQ ID NO: 345 - DNA, 359 bp, Lilium asiatic
  Clone ID: LIB3229-007-P1-K1-A8
cccacgcgtccggtgactcaaccggatggaaatacatatctagttttagaggaagccgaactggttctgtaggatccttacttgacatgttagagttcttatggcgttgtatacttaggaagcaagtggagaaggcattggcagtgatccttggtttcatgtcagctgccattcttttggccgaggctactttgttaccaagtggagttgatttatccctcttttccattcttataaatgcagttggaaagcaggaggtgcttgtccagattgctgcatttgttccggtaatgtacatgtgcatctgcacatattacttcttatttaagatgggaatgctaatgttctattcattgaca

SEQ ID NO: 346 - DNA, 373 bp, Lilium asiatic
  Clone ID: LIB3229-007-P1-K1-B1
gataatctgtccatcgattttctttggattagcattcttgtatagttttggctttcctccgtcgccaattaatgatgaatcccaatttttatgaaaatctatatgttgaagcttatgtacaattagatttactctcaagatctttaaatatctaacacaaagtataattacgatgttgaagcttctaaagaaatatattggaagaactttgtccaacaacgattaaaggtgtggactaaagctggtgtgacaaagctattgcgtttgtttaatacataattacatgagcgagcaaaattggatggacgagattagtggcttgatatatggtttttaatgttgttcactcattggcagcctatgtgctggtctg

SEQ ID NO: 347 - DNA, 331 bp, Lilium asiatic
  Clone ID: LIB3229-007-P1-K1-B10
gtctaactaaatggttggcatttccggtctccctgaagcacactgcaatagctacatagaaccagtgactcgagtcggagaaggtccctcttaaaagtctggtttggatgttttttttgcggaccaaaggcatccactctgtagctagtacagccaccatatgaagtaggtcaaagccacaaaggtggcaggcctcagactctgtatctccgcttgagtaggaagttttccccaaagggcttcaagcatttcaggtatacagtaccgtaacaaaatactatagttttggtttcatacaaaggctgaatgaatatgcctgtttccatcgcaa

SEQ ID NO: 348 - DNA, 230 bp, Lilium asiatic
  Clone ID: LIB3229-007-P1-K1-B2
ccacacatccggttaatctgtccatcaattatctttagttttgcaaccatgttttaatttagctgggctgcgtctccaattaatgatgaatcccaaatcttatgaaaatctatttgttgaagcttatgtacaattagatttactatcaacatctttaaatatctaacacaaattataaatactatgttttaatcttcttaaagaaatttattggaagaactttgtccaac

SEQ ID NO: 349 - DNA, 428 bp, Lilium asiatic
  Clone ID: LIB3229-007-P1-K1-C10
cggacgcgtgggcttgccaaacagaataattcatccaatcgctgagcactcagaatatccgatcgagggacttgctttttcaagtgatagaaagtttcttggcagtatttcacatgatcaaatgttgaagctttgggacatgcaagatcttatggatggtcatcaatataatgcttcaagcaatccacttgttgcatctagtagtgatgacgacgagatggacgttgatgtgaagccctcgaaagggaatgcgagaaaaaagatagacaaggggcagagttccaaatcttcggccgcaggtttctttgctgatatataattgagtgccttgttttgtgtgagaagctattttgtccgcaattaggaattttgttaaaaactagagtttgttgttccttgccctatgttgtcagttgagatgtatcttt

SEQ ID NO: 350 - DNA, 141 bp, Lilium asiatic
  Clone ID: LIB3229-007-P1-K1-C4
cgaacttacataatcttaagttcggagggagtgaatgagtgatttctctttgcagggagtatgacacagtttggtggcgtaatacagcgatacaaatgtaacttggtcatattgacataaatgtaaatgttatatgctttt

SEQ ID NO: 351 - DNA, 391 bp, Lilium asiatic
  unsure (1)..(391): unsure at all n locations
  Clone ID: LIB3229-007-P1-K1-C6
gcccctggagggtggaatgggccagcaccccaggcttcctaaatgggtggatgggggttgggatatggtggcaccaccgcctcctgctggctgtccttactggattggaggctgcttgcaccagtggacggtgctgtcttcaggctgggagtagatggaaattggtattcttgccatttaccaattgaagtattttctttagatntattttcaaatgtttcttagggaaaacagcgccctttgttagtagttgtacttctcttaattcaggtactttgatgcttttaagttttgttgagagctgtgagctacttctggtttcagttttggacttgcttttcttaatttcctgtttttggactgctagttgcattaatcctttattatgagt

SEQ ID NO: 352 - DNA, 438 bp, Lilium asiatic
  Clone ID: LIB3229-007-P1-K1-D1
ctaatgtttctggtacctcaaacatcatccctgagatggatatatgtgactttgactttgacccctgtgggtactctatgaatgggattcatggttcggctctatcaactattcatgtgaccccagaggatgggttcagctatgcaagctacgaggcgatgggttttgattctagtgctatactgtttggtgacttggttgagagggttctctcttgctttggtccgaaagagttctctgttgcagtgaccatctttggtgagcgtgagcaagcatgcacttggggacagaacgttggagtgggtctctatgactgtgagacacttgtggagcaagagctccctggaggggggattctgatgtatcagagctttgctgcctctcccgtgggggcagaatctccgaggtccaccctgcagcattcatgggacaaggaag

SEQ ID NO: 353 - DNA, 274 bp, Lilium asiatic
  Clone ID: LIB3229-007-P1-K1-D12
gttgatttaatcaaaagcagaactttgcgacatgactctggctataggtgatggggccaatgatgtttcgatgatccaaatggcaaatgttggagttgggatatgtggtcaggaaggtcgtcaagcctgtaatggcattagactttgctttggggcaaatccgaattttgaagagactgtttctcgtgcacgggcactggaactatcaaaagggttggcttttctgggttttgtacaaacttcttaccggaaacgcttgttttacgtattaaat

SEQ ID NO: 354 - DNA, 435 bp, Lilium asiatic
  Clone ID: LIB3229-007-P1-K1-D2
ctctgccctagatcggagtatccgttccttgacgcgctccgatcggagtccccggcgtggatcgagcgctggccggccgttgaggtgcgcggagatgacctcgatggagtgctggctcgtggacatgaaagtgaccactatgctattctgttctatgcatcctggtgtccgttctcgcgagacattaggccaacttttgatgctctcagtttcatgtttcctcgcatgagtcacctagcagttgaagaatctactgccatgccaagtgtgttctcgagatacggggttcatagttttccaacaataatggtcgtcagccggacaacaatggtacggtatcatggtcctaaagatttgaagtccctcgtccgtttctacaagcagacaacaggcctttaccctttgttgcatcttgaagttgatgaacccagcagc

SEQ ID NO: 355 - DNA, 396 bp, Lilium asiatic
  Clone ID: LIB3229-007-P1-K1-D4
ctgcctcctcccccaaatccctaaattctctcccctccgccgccgatcgccgccgcgaatcatggccaacgccgcgtcggggatggcggtgaacgacgagtgcaagctcaagttcctcgagctcaaggcgaagcgcacctaccgcttcatcgtcttcaagatcgatgagaagctcaagcaggtcatcgtcgatcagctcggcgatcccgaaatgacctacgaggatttcaccgctactctccccgccaacgagtgcagatacgctatctatgattttgattttgtcaccgccgagaattgccagaagagcaagatcttcttcattgcatggtcgccggatgtcttgagggtgaggagtaagatgttgtatgcgagctcgaaggagaggttcaagaa

SEQ ID NO: 356 - DNA, 434 bp, Lilium asiatic
  Clone ID: LIB3229-007-P1-K1-D5
gcagagtgccgcaagaacatcgaagattacatggtagagaagctagggatcgagaagggcaaggtctcggaattgtgtggtctgttgtacaggtattatgggacgacaatggccggtctaagggctatcggctacgcattcgactatgatgattatcacagtttcgtgcacgggcgattgccttgtgactggctgaagccggatcctgttttgagacatctcttgttgagcctcccgattcggaaggttatatttacaaatggcgacagactccatgctgcaagggtgcttgccaggctggggctcgaggactgctttgaggggatcatttgttttgagactctgaatccgccttgcgaggatcagacggcggataatgtgtttgacatagttgagtatttgtcgaggacagatgtagatgatggtggtgagtt

SEQ ID NO: 357 - DNA, 431 bp, Lilium asiatic
  unsure (1)..(431): unsure at all n locations
  Clone ID: LIB3229-007-P1-K1-D7
cgagaaagttgattatatattcaatgtatgaaaatattattttttattatgatgattagtcattttaaattatttagataaataaaaagaaaatggatgcgcactgacatcaaattaaatatttagtagtttgaaaacgttaagaggtatgtggttctagacaattttctgtctgttatatattgttgtacttaactatacaagctcatattgtttacttatgcataatcacttaatataatcgaagttgattaatttaatgaaggagttgacgatgtttactgctggttgtctgcaacctaacacaacccttcatattttccatctgggcttgggaccggcaatggcaatgtnttaatttagtaaaaacttgaaagaataaaatattaatcaaccaagaatcgaaatttaagaaacaagaaattagtttt

SEQ ID NO: 358 - DNA, 477 bp, Lilium asiatic
  unsure (1)..(477): unsure at all n locations
  Clone ID: LIB3229-007-P1-K1-E1
ccggttggagcncnngtgattggcaagggagtggtnnggtataatannaagcaaataagggcaccgagtcgtggagccgtttatttcaaagttgnnacagcaccaaannactgaagannngactgcataatanntcagtttctgccaaaggagttcttttgaaagatnngcggtctcttccgaccaatagaaatgctgttatgcgcttgtatcccaagatgccagtgatanagtctgaaaaagnaatccggnaagtnttcatacanccactcgctttcttgtaccgacttcacgtgttggttgtctaattggcaaagggggaacaattatttctgaaatgcgacgaactacccaagcaaatatccgcattctttcaaaggagaatctccccaaggttgcttctgaagatgatgagatggttcagattagtggagatctcaaggtcactggtgacgctcttcttctagtgctagatcg

SEQ ID NO: 359 - DNA, 115 bp, Lilium asiatic
  Clone ID: LIB3229-007-P1-K1-E2
gacccacgcatccggatggagccgttattggcaagagtggaggtttaataaagcttataaggcacgagtgtggggcgtttatcaatgtagacagcaccaaaactgaagacgactg

SEQ ID NO: 360 - DNA, 438 bp, Lilium asiatic
  Clone ID: LIB3229-007-P1-K1-F1
gaactactcactcctttgcaatctattctcgaattgagagcgatggacatcatgtgggcgctgaacaacccgatgatcgccgcgacgctgcagcatctggtcgacgacgagccggccgccaacaccaacacccccagccgtgcctacgcccgcgaccgcaaggcgatggcccgcacccccgccgacatcaaggagctggccaaggcctacgtcttcgaggtcgacatgcccgggatcaactgcagcgagatcaaggtcactgtcgaggagggcaagatgcttgtcatcagtggagagcgccgccgcgaagatgagaaggcagagaaggagaaagagaaggaagggggcgcggccaaatatctgaggatggagcgccggatggggaagtttatgaggaagttcccgctcccggagaatgctaatgtggatgctatcagt

SEQ ID NO: 361 - DNA, 383 bp, Lilium asiatic
  unsure (1)..(383): unsure at all n locations
  Clone ID: LIB3229-007-P1-K1-F2
tgtcgatggagtgacgattagggatgtatggngcgcggacatccagcagcctgggtcgatcagaggcatcaagaatgcgccattcactaggatatgtctttcaaatgtcaggtttttggcttcgggtgtgcaggaagtgccatggaagtgtactgatgtgagtggtgcagccctggaggtgcagccagggccgtgtgcggagctgaccagcactgctgagacgggattctgcgggactgctctgtgagttcgaatattttgttgaatttgtattattttgaccaaggatgttcatctcatgttattcttcttctttagttggaaatatatttggtaagtaattttcaggatatagttatatagttataccactattgatgaaa

SEQ ID NO: 362 - DNA, 434 bp, Lilium asiatic
  unsure (1)..(434): unsure at all n locations
  Clone ID: LIB3229-007-P1-K1-H1
gggacagatgatggatctctacatcccgaggaagtgttccgcgacgaacaggctcatcaccgcgaaggatcatgcggcggtccagatcaacatcgggcatttggatgagagcggngtttacaccggccagttcactaccttcgccctttgcggcttcatccgtgctcagggtgatgctgatggtgctctggaccgtctttggcagaaaaagaaagtagaagctcgccagcagtaaaaagtagctgtagggcgttttgcagtggaagatctggttttagtttcaacatatgttactttgacctctactagttactctatgctttggttattttggttgcctggttggacaagatgaaggctggcattcatgtntaacttttaaattaatttgactttttttcctaagggatatgtttctttatgtatatgagcga

SEQ ID NO: 363 - DNA, 425 bp, Lilium asiatic
  Clone ID: LIB3229-007-P1-K1-H10
gagaaaagagctcctcgccgccgccgtcttcctctcgctctttgaaacatggattcccagcctaagctagcacaagtcatcaaggtcattggtcgaactggttcgaggggtcaggtgactcaagtcagagtgaagttcctgggtgattcagatcgcatgatcatgaggaatgtgaaggggcctgttcgtgaaggtgacatcctcactttgctggagtctgagcgtgaggccaggaggcttcgctgattttgcatctttcaatgctccgacatctttcaatgctccgatgtttcatcttttaaatcttattgtgtacttctgatcttgggatatgtttagtatgactgcctctttaggtttattgttttgaagtgttttgctttgtatttgggacctaaattgattggccgtgcctattgctgttt

SEQ ID NO: 364 - DNA, 202 bp, Lilium asiatic
  Clone ID: LIB3229-007-P1-K1-H2
cttttgtgtctctttataatgctgagttagattctcactcactcactgctgtagtcctgaagaatgaactgtatgtttcattcctgagggtttacttgtctagtttttgtttggttacatatcacagttttattttttaaatgttaacatatcagacagtttttttcctttctaataataaaaaatatattatattatggat

SEQ ID NO: 365 - DNA, 414 bp, Lilium asiatic
  Clone ID: LIB3229-007-P1-K1-H4
ctgaaattctcggggtttgcgagaagttccgagcgtattatcttgggactcataccggtaggagattgacatggcaaacaaatatgggcactgctgatttaaaagcaacctttggcaaggggcagaagcatgagctcaatgtttccacatatcaaatgtgtattctcatgctattcaactctgcagaccgtctgacgtataaagaagttgagcaggccactgaaataccagctccagatttgaagcggtgtcttcagtcgctcgcatgtgttaagggcaagaatgtccttcgtaaggaaccgatgagcaaggacattgccgaggatgatgccttccactttaacgacaagttcaccagcaagttcattaaggtcaagatcgggaccgtggtggctcagaaggaatcggagccag

SEQ ID NO: 366 - DNA, 415 bp, Lilium asiatic
  Clone ID: LIB3229-007-P1-K1-H8
ctaaacccttttatgcatgctcgaggggtttcgttcatggttgataattgttccacgactgcccgtttgggttcgaggaagtgggcaccgcgtttcgattacattcttacccagcaggcgtttgtggctgtggacaataatgctgcaatcaatgaagaccttcggagcagtttcttgggtgatccgattcatggtgccatcgaagtatgtgcgcagctgaggcctactggggacatatcagtgcctgctgatgctgatttcgtgcgcccggggttccgtcaattgtgcaactaaggtttgtttcagggtggtggttgggaattggtgtgctgtttatgtctttggtttgacaagtcatgccttagtgagttatttagagtttgtaggttgcttgttttttgagtgaaaacaatgc

SEQ ID NO: 367 - DNA, 415 bp, Lilium asiatic
  Clone ID: LIB3229-009-P1-K1-A3
agtatatgtcccatctgttgctaatgctcattatcttcgtcttccaactgaagaacccgaggcagaagaaatttcggcagaacataccattgctggagaactttcaaagtcggaagctgaatgcactgaatcaactgtatacgacaacctgcaatgtctttcatcctttattgctgaagaaaatttggactgtaggtctactttggagaaggatgtccgaaatttatctgatccagaagccagtcaccttctctcagctatgtccgtttctgatgatgatatcatcttgcccactcttgtagacagttttccctttatggagtctcacactcttgtatcggaggactctttcttcccatcaagtgaatcatttatagatggcggtgacactcaaatgatggttcctggaactgag

SEQ ID NO: 368 - DNA, 72 bp, Lilium asiatic
  Clone ID: LIB3229-009-P1-K1-A4
cccgtccgcaaaaggaaagaaagagaaaaaaaggttgttcatcatgtcaggcccaggaaagggggggaaggg

SEQ ID NO: 369 - DNA, 176 bp, Lilium asiatic
  Clone ID: LIB3229-009-P1-K1-A6
cccacgcgttcggtctgcaaacatttcaaagatagccaggagaagaaatggaatgtatgtgttacagtcttcagggattagactataagtacaatattatacaactgtttttgtattactgctctcaactcatgtttaatataattattgtactcttcaaggctaaaaaaatacaa

SEQ ID NO: 370 - DNA, 256 bp, Lilium asiatic
  Clone ID: LIB3229-009-P1-K1-B11
cggacgcgtgggcggtgctggtcccaagatcgaggaggttgactaagtttcttttataatgctttttttaggtaactgaaagtatttccttggctatcttgccttgactgcttttgatgatgaacaccttacctgttatgtttaactactttatggctacattagtagtctttttggttatctgcatgatgaactagttggttttaatggattaaattcgaattctggatttggtttaagttggctttaatatatt

SEQ ID NO: 371 - DNA, 400 bp, Lilium asiatic
  Clone ID: LIB3229-009-P1-K1-B2
gaaaactagtgtagcagaagggagtcttttggtttagcagcctgattgatgcgaaattgaatctgcttgattatgaccatatcgtggaattcctgatggaccttggtaccgttcaatcgaatctcaatcgaggtctctatgcaaatccgttggagttagcggtcggggaggagctgtctttcgacaatgcaatgctttgcaacccaaaagggatatgttgcatgatttggttgccaattttctccgcacatttgatattgatttcagtcctgtgttctaggagtacgagaagcagccattaacattttctagggaggaattcaagcaactaggggtcactatttggtcgcaagcgcctttacccttgtagcttctaaaagtgcatcatgctgaggagttc

SEQ ID NO: 372 - DNA, 378 bp, Lilium asiatic
  Clone ID: LIB3229-009-P1-K1-B6
cccctctcatccctttatctattttaatttgataaattttgggttaattagtttgtatctttgtaggtcgccggagctgaggggggttgatgaaggccggacggcatctccatggagacctgggctagagcaagttgagaagagaagggaagtggataggggtagtctctaaaggacagtacaagggatgtgtggctagagagatatctccagataatgaaggtcagttcatggtgcaattcatggacagtgcaagcttgtgtcagtaatggtgatgtagcagagcatggtgagcaagctccaatccagtgaggcaggagagatgcatagctagtacatgagcagtagtaggtttatcccaagtacagagggcaggca

SEQ ID NO: 373 - DNA, 81 bp, Lilium asiatic
  Clone ID: LIB3229-009-P1-K1-B7
gttttattttgtagcgatataattggatcttagggttaattttgttttgtgcttttattctgcgaagagttcatcgggatt

SEQ ID NO: 374 - DNA, 409 bp, Lilium asiatic
  Clone ID: LIB3229-009-P1-K1-B8
cccaacctcaaacaaaccctaaccctaatctctccgtcatcctccaatggcccgtaccaagcagacggctcgcaagtccaccggcggcaaggcccctaggaagcagcttgcaaccaaggcggcgcggaagtccgctccggccacaggcggcgtgaagaagccccaccgcttccgccccggtactgtggctctccgtgagatccgtaagtaccagaagagtaccgagcttcttatccgcaagcttccattccagcgccttgtccgtgagatcgctcaggacttcaaggccgacctccgcttccagagctcggctgtggcggcgctgcaggaggcgtcggagtcgtacctggtggggctgtttgaggacaccaacctctgtgccatccatgcgaagagggtgactatcatg

SEQ ID NO: 375 - DNA, 412 bp, Lilium asiatic
  Clone ID: LIB3229-009-P1-K1-C1
gcgcaacggatggggaacacgctgatgctctcgcgacgcaggtgcgccgactggccatggaagtccgacaacttgcctcggcacgtccaataactgttctcaatggaagtggaggccaatcaggtaatttctcatcacttttggtgccagccgcaaccgtgggggcattaggttatggatatatgtggtggaaaggcctctcattctccgaccttatgtatgtgaccaagcaaaatatgtccaatgctgtttcaagcatgacaaagcatctcgaccaagtgtctgctgcccttgctgcgacgaagaaacatttgacacagcggattgagaatttggatgggaaaatggacgagcagaaagcaatatcatccgaaataaaaaatgaggttattgatgctcgtgataaacttac

SEQ ID NO: 376 - DNA, 411 bp, Lilium asiatic
  Clone ID: LIB3229-009-P1-K1-C10
cccacgcgtccgatgatactaggtgtgcttactttgaccgagttgaagaactcaagggtttcggggccaaaaataaagaaaatattgcatacttgctttgggcattctttcattattgggcgtattattatgactacacagatgatgttatatctgttcgcactgggcgcattatcagcaaacgatcgaagggctggacgaagcggattctaaacgaccgtcatctcatatgcatagaggatccttttgaaacctcccatgatctgggccgcgtagttgacaagttcaccatcagaattctgagggaggaatttgagcgggctgcggatgtgctacaatacgatccaaatcccacaatcactctcttttaaccttatgtcccgtctacccataacttgcaccaaaattata

SEQ ID NO: 377 - DNA, 340 bp, Lilium asiatic
  Clone ID: LIB3229-009-P1-K1-C11
gatcagcggaccaaagtgccatggcatcgccagcggacacaaacgttctgatcgagtcggtgggcgagggaagaatgaaacatccaacccgatcagcgggcaaatacgccctgaatcggtcaaaacaacagtccaacacttagctcgatcagcctgcgattgcgccctgatcgactaactaaaaggcaaagaacaagacattctaagttcgcggtccagaaacagaaggaacaagctgaatcttatttgacgcacaaacccagaatgaaatcccgtgtatgtgcgcccagggggaccactcttcctactactttgagacgatcatcagaacaacttaagc

SEQ ID NO: 378 - DNA, 416 bp, Lilium asiatic
  unsure (1)..(416): unsure at all n locations
  Clone ID: LIB3229-009-P1-K1-C6
cccacgcgtccgtgctgcggttccacaagtttaccataggtcattgctggacctcagattatggttgttcagataatgaagaagaattccactggcttatcaaatactcgccactccataacgttcaaaggccgtgggagaaatatgttggtcagccttgtcagtacccaccaaccatgctcttgacagctgaccatgatgatcgtgttgtgccacttcactcattgaagctgttggctacgatgcagtatgctctctgtacgagcgtcccgaacagtccgcanacaaaccccatcatcggtcgcatcgactgcaaggctggacacggagctggccgtccaactcagaaattgatcgatgaagcagctgaccggtacggatttgcggctaaaatgttgggtgcatcatggatcgag

SEQ ID NO: 379 - DNA, 406 bp, Lilium asiatic
  Clone ID: LIB3229-009-P1-K1-C7
accatcctgggcagattgggaatggttatgctcctgtccttgattgccacacctcccacatagctgttaagtttgctgagatcctgaccaagatcgacaggcgatcgggtaaggagctggagaaggaacccaagtttctgaagaatggtgatgctggtatggtgaagatgattccgactaagccgatggtggttgaaaccttctctgagtatcctccactggggaggtttgctgtgagggacatgaggcagactgttgctgtcggtgtcatcaagagtgttgagaagaaggatcccactggagccaaggttaccaagtttgctgtgaagaagaaatgaatcgaagggatttctgcactggttttcggtttgcttgttggtggtggtcttgaggttggtgtcgtttt

SEQ ID NO: 380 - DNA, 402 bp, Lilium asiatic
  Clone ID: LIB3229-009-P1-K1-C9
tgaagaagtccgagtatgaaactgtaaaatctcaatggcagaatatatcagcagtacaagccaaacggtttacaaagttcaaggagcggaaaggtctcatcgaaaaggatgtggtgaggacagacagatccatctcttactatgacggtgaagacaatccgaatgtccgactcctacatgacatactgttgacgtactcgttctacaactttgaccttgggtactgtcagggaatgagcgacttcttatcgccgatattgttcgtcatggaagacgagtctgaatcattttggtgttttgtggcactgatggaacgcatgggccctaattttaatcgtgaccagaatgggatgcatgctcaactttttgcgttgtctaagctggtggagcttttagactatt

SEQ ID NO: 381 - DNA, 397 bp, Lilium asiatic
  unsure (1)..(397): unsure at all n locations
  Clone ID: LIB3229-009-P1-K1-D10
atcatgatgacattgtgattaactgggccggtgggctccatcttgctaagaagtgcggggcttcaggattttgttatgtcaatgatgttgttcttaccgtgctggagcttctcaaggtccatgagcgtgttctctatgtgcatgtgctttatgtggacattgatatccaccatggggacggagtagaggaggccttctacacaactgacatagtaatgactgtttcattccacatatttggagactatttttccagaacttgagacatactctacactggatacgcgaaagggaaatattactctcttaatgttcgttttgatgactgaattgatgaagagagctatcaatctctgtttaaataaatcatggcnaatgtgatggaagtttttatgcc

SEQ ID NO: 382 - DNA, 413 bp, Lilium asiatic
  Clone ID: LIB3229-009-P1-K1-D11
ttctgtccctataaatacccccctaagagggcaatataaactcaaattagctctcatcttttcatggtatcaaagctcagacagatctagggttagggtttctccgaattctcttccctcactctaaatccctgatccctcctcaaaccataaaggaagagaaaaaaatacctatgacaatcatcttcttcgtcttcggcgacatcattaggcgaggagtccgccggcaacgcctccatccatggttgcggaaacttcagcgacaacatctgcttggatcgacggcgccgctgacctccggcgccacctctcttctccggcagcagccttccctccgacggcagcggtgactcctagaggcggcttcaactcccctcccgccaacctctctcccatctcccaacttctgttgc

SEQ ID NO: 383 - DNA, 411 bp, Lilium asiatic
  Clone ID: LIB3229-009-P1-K1-D2
gaaaaagtctcatggtgaatcatattgtgagtgtgattattgttacatcaagagacgataaaggttgtattaatatctgggacagtgtagctgcttggcaacttggaaatgttattgcgttcttgtttacgatcgggtgttggagtaatggtggtaagagatgtgaagaacgagtacaagtggaggtgtatggcagagatggacatgtggtgagtgaaggagaagcttgaacatgaatccaacatgagtccaagactgctgttcttgttgttgcgatgaaggaggaggggatgcagtgtgcatatgcgtgatgtggggtatgctctgtaggtttgcagaagcattgatgaaggagaagctgttggcgatattgacggaggctgaggaagatgttgaccacatattggggat

SEQ ID NO: 384 - DNA, 414 bp, Lilium asiatic
  Clone ID: LIB3229-009-P1-K1-D5
gggggatcacccggacagagagatacaagtccttgggaaattcattccaggttgatacagttgcctttcacctctctgtcctgaaggacatgtttccagatgggatcaaagtgttgtcactcttctccggtattgggggtgctgaaatagctctgcatcgtctaggaatacatcttaatgtggttgtttctgttgagatatctgagtccaaccgaaacattcttcggtgctggtgggaagagaacaacctgtctggaaccttgatccatatggatgacatccaagaagtaaatatcaagacactggagaagttgtgcgaaagctttggtggctttgatcttgtcattggaggcagtccgtgttacaatctcactggaagcaaccgctatacacgcgacggtcttgaagtgaaca

SEQ ID NO: 385 - DNA, 410 bp, Lilium asiatic
  Clone ID: LIB3229-009-P1-K1-E1
gtccaccggcggcaaggctccccgcaagcagctcgccaccaaggcggcgcggaagtcggcgccggccaccggcggcgtgaagaagcctcatcggttccgccccggcacggtggcgttgagggagatccgcaagtatcagaagagcactgagctcctgatccgcaagctccccttccagcgcctggtgagggagatcgctcaggacttcaaggccgacctccgcttccagagctccgctgtctcagcgcttcaggaggcctcggaggcatacttggatggtctggttgaggacaccaacctgggcgccatccatgccaagcgcgtcaccatcatgcccaaagacattcagcttgcccgccgcattcggggcgagagggcttgaaaattctctgtctggtcctcctgtggat

SEQ ID NO: 386 - DNA, 416 bp, Lilium asiatic
  Clone ID: LIB3229-009-P1-K1-E11
ctcctttctcaaggaggctgaagagtcgcttgcagggcaagatgggcagaaggttccggtgatcctccctgttgctgctactatggcgttgtatgcgttacacctaaagctgcgatatggcgagagcagtgatgggatggtgacgcgaaacgatgcagaggtgccagggtcggtggtcgtgaggccccagagaaagctggatcatggatggatggtgtactctacgatgcggacggatcaggttgaggctgatgcgacggagatgtgtgaggctctcttgaccatgcttgtagagattggagaaaggaagaaagttgtgaacacatcataagatattggattcggattggaattgtaaaataaaatgcatcgactaatcgaataactaaaattccttgtgatgggaatgacgatgt

SEQ ID NO: 387 - DNA, 125 bp, Lilium asiatic
  Clone ID: LIB3229-009-P1-K1-E12
ctcattcgtccaagaagccttacttttacttaccattctagaatcgcgggaccgtgcgcttagacttattctttctcttaaaatcgcgatcttatcattaactcttaaatacccttatttaaaaa

SEQ ID NO: 388 - DNA, 335 bp, Lilium asiatic
  Clone ID: LIB3229-009-P1-K1-E6
attgcgtttaaatagaatttttctattttatctataatataatgttttaaaaaggaagtggagttattgagtttgctatatttcatcataaaacaaagtaaatgattgatcacttaagctcaacccgaccgcaccttatatggctaaaggtgtcgtaccacttacccgtaaccgtaccatttcaaattaacctccgtgccatgtaacattaatacaaaatatgggctaacctcttatataagtcctcaactttatatttcaaataaaatattacattgttataatttggtacctaatatttttactcttgcataaattggaaataatctgctatc

SEQ ID NO: 389 - DNA, 385 bp, Lilium asiatic
  Clone ID: LIB3229-009-P1-K1-E8
cagaaatgtcagctgccgagctagcccccgccccagcccctgccaaggtggccaagcctaaggcgccaaagaagacctccgctccaaagaagcctgcagcccatcctccctacatcgagatgatcagcgaggcgatttccacgctgaaagagcgtggtgggtcgagccagtatgcaatctccaagtttattgaagacaagcataaggctcacctcaccggaaacttcaagaagctccttctcgtccagctcaggaagtccacagctgccggcaagctgactaatgttaaaaactcttacaaagtggctgtgaaaccagctgctgcaaagaagcctactgcagcctagccaaagtctgccgctcccaaagcgaagaatgctgctgt

SEQ ID NO: 390 - DNA, 395 bp, Lilium asiatic
  Clone ID: LIB3229-009-P1-K1-E9
cggacgcgtggggctccagatctgaaggagcctcttgcaaactacaaccaggatgcttataggctgcagttgaagctgttcctctatgaagttaagcagcagcagttgctctctggtgtacgtagttacttaaaactgtactctaccatctcaactgcaaagcttgcaacatatctggaagttgatgaacccacgttgaggacaatcttgatgacatacaagcacaaaatgcattcagttgatagtgatggaaagataatatccaacgctgatgtcgacttctacattacggaagacattgtacatgtcatagaggcaaagacggagaaacaatatggtgactacttcctacaccagatctttgaagttgaagaaataatctgtgagttggacag

SEQ ID NO: 391 - DNA, 211 bp, Lilium asiatic
  Clone ID: LIB3229-009-P1-K1-F1
gcctaatgaggctttcttgtttatgtaataatattatggatgcagttgaagcccctgcatccacgaaaacatgcatttttttcgaggtgaacacttctgtttttggttttgttttccttgtttggcagtatttgcttagattgtgggggaagggcaagtgccctctttactttacctagctcttttttgtcgaataaaaatgagacttgat

SEQ ID NO: 392 - DNA, 140 bp, Lilium asiatic
  Clone ID: LIB3229-009-P1-K1-F12
cccacgcgtccgagaatcctcacttttattttttattatagaatcgagttaccgtttgctttgttgaattcgattagtgaaagtcgcgaacttataataaactctttaatacccttagtaaaaaaaaaataataatagaa

SEQ ID NO: 393 - DNA, 403 bp, Lilium asiatic
  Clone ID: LIB3229-009-P1-K1-F2
gataatgtctgggcgcggcaaaggcgggaagggtctcggcaagggcggcgccaagcgccaccgcaaagtgctgcgggacaacattcagggcatcaccaagccggcgatcaggcggctggcacggcgcggcggcgtgaagaggatcagcggcctcatctacgaggagactagaggggtgctcaagatctttctggagaatgtgatccgtgatgctgtcacctacacagagcatgcacgccggaagacagtgacggctatggatgttgtgtatgctctcaagcgccagggacgcactctgtttgggttcagaggctgatctttttctctgctattctggtcttagaaggtttcgattgcttttcgctatgaaagttgttttcgggtgcatgcttttgttggatca

SEQ ID NO: 394 - DNA, 405 bp, Lilium asiatic
  Clone ID: LIB3229-009-P1-K1-F3
cccacgcgtccggggaaattgtccgtgacatcaaggagaagcttgcatatgtggctctagactatgagcaggagctagaaacagcaaagagcagctcatcagttgagaagaattacgagctgcctgatggccaggtcatcaccattggagctgagcgcttcagatgccctgaggtcctgttccagccctcactcattggaatggaagctgctggcatccacgagaccacttataattcaatcatgaagtgtgatgttgatatcatgaaggatttgtatgggaacatcgtgcttagtggtggatcgacgatgttcccgggcattgctgaccgtatgagcaaggagatcactgcactggctcttagcaacatggaaattaaggtggttgccccccagagaggaagtc

SEQ ID NO: 395 - DNA, 405 bp, Lilium asiatic
  Clone ID: LIB3229-009-P1-K1-F4
cacttgtagaggaagacaagcttgatctcgcaacagcacttctcgagaaagcgaaggctaaaggcgtacgactaatgttgcctaccgatgtggttgctgctaacaagtttgcagcagatgcggagagcaaggttgtacccgcgactgccatcccagatggttggatggggcttgatatcggaccagactcaattaaatcttttagtgagtcattggacaccaccaagaccatcatctggaatgggcctatgggagttttcgagtttgagaggtttgctgcagggacagaggcaattgcgaagaagttggctgaactgactggaaagggggtggtaaccatcattggaggtggagattctgttgcagcggtggagaaggcggttcttgctgataagatgagccaca

SEQ ID NO: 396 - DNA, 397 bp, Lilium asiatic
  unsure (1)..(397): unsure at all n locations
  Clone ID: LIB3229-009-P1-K1-F5
caaattggcacaataactgaatcaattagagctgctcttgattcaaaagctgcaggctggggggtgatggtcagtcaccgtagtggcgaaacggaagataattttatcgctgatctatctgttggtctggccactggacagataaaaactggagccccttgtcgtagtgaacgtctggccaagtataatcagcttctccggattgaagaggagctcggaaatgtgcgttatgctggtaccagtttccgttctccatagaaaagacgtgataatgtttgcgtccttagagaaataaggtacctaaccataccttccgaacaactttgaagctattgntttcgaactataagagcatgcagattntgtagaaattcagcaagatgaatcagaaagtggc

SEQ ID NO: 397 - DNA, 347 bp, Lilium asiatic
  Clone ID: LIB3229-009-P1-K1-F6
agcttatgggtgccgaaatccaagagcggcttaaaggtgccaagaactcgctgatgtatatgtggccactgatgcatgatgatgttgaagagttcgtcgaggaaatgtcaaccgttgatgctttcgatgtcgaaaaacgaggtaggaagcttggatatgtcgaggattgctcgtcgggggtcctgtcacatctgataccgtacgtcggggagaaaaaacatgtcggtagtcctactttatctcacattgctactgtaatatagcccacaatgctacaataccaatatttatattaacacgccccctcaagctggagaggaatgacaaagttcctccatcttggacac

SEQ ID NO: 398 - DNA, 256 bp, Lilium asiatic
  Clone ID: LIB3229-009-P1-K1-F7
ggcgcgagcctttccaaagtgaataatgagcattctctgtctgtcaaggggagggaaatgaagaatgtggcggtgaatagcgatggaaaggcgtcaaaagtgaagagggaagaaatcgaagtttgggatgaggaagaagggtctgacaagggaaagacaccgaataaggggagtacaaatagtaaactgaataaagaaggcctgtattccgataacgaaaaagagaaaactgttaaagacaagaaaaagaagaaga

SEQ ID NO: 399 - DNA, 416 bp, Lilium asiatic
  Clone ID: LIB3229-009-P1-K1-G12
ggaccaactactctctggcaatatgtcatcgctctcattctttttatccttaccataggctcttgtgtagagctaggaattgcatcccagataagtagtctcccaccagaggtagtgaagtacttcacagatcccgattctgcagaaccacctgatgtgcagcagttgctcccatttgtagaatctgctctgccagttgcatatggcgtgcttggtgttcagttatttcatgaggttggacattttttagcggcatttccgaggaaagtgaaattgagcattccttactttattcccaatataacccttggcagttttggtgcaattactcagttcaaatctattcttccggatcgaaggacaaaggttgatatctcattggcaggcccagtggctggtgctgccttttccctggc

SEQ ID NO: 400 - DNA, 415 bp, Lilium asiatic
  Clone ID: LIB3229-009-P1-K1-G2
ctctttatatcttcacgcatcctcttccctctgtcatcttcatctgtctgtttatacccaattcagcgttgcaactccagagagatgggtaactgcctcagactccggtcggccaagacatgggccgaagaaagctgggactccatggatgggcacgagagcctcagagggcacaaagtggaggagaaggcaaaaccgagcaaccagatgaagataaagctcaccaagaagcagctgaaggagctgctccggcaagctgaacttcgtggtttgacgattccacaggtgttcaccagtctcgcaaacatgactgacggatcatctatcgacggcctccggcggacgtggagaccgatcctccatagcataccggagatctcggagtagaagggttcttaatggaggcgactagctg

SEQ ID NO: 401 - DNA, 405 bp, Lilium asiatic
  Clone ID: LIB3229-009-P1-K1-G5
tagctttctcttctttggtaacgatgtcttcttgctgtggtggaaagtgtggctgcgggtcttcctgcaagtgtggcagtggatgcaatggatgtggtatgtatcctgacttggctgaggggagcactgcctctaccactatgatcatggggtttgctcctgccaagggggagtttgaggggtttgagatgtatgctgagaatggtggctgtggctgcaagtgtggtgataactgcaactgcaacccctgcaagtgtggcaagtgatctctccatggagaagaggatgtagggtttgataccctttgtttacttgtttctgctgtagtgctgaataatggccatgggtttatatgatgcaagtctttttgcaccatgagtggttgttcaccagtggcttagtgtc

SEQ ID NO: 402 - DNA, 408 bp, Lilium asiatic
  Clone ID: LIB3229-009-P1-K1-G6
attgcgtttaaatagaaaatttctatgatatctataatataatgttttaaaaattaaattgatttattgagtttgatatattttattataaaacaaagaaaatgatagatcaattaagcttacccgaccgcaccgcatatggcggaaggggttgtaccacgtacccgtaactgtaccatgtcaaagcaacctgcgtgccatgtaacattaatataaaatatgggcaaacctcttatataagggcagaactccgaatttcaaaagaaatattacatcgtgatagttggtatctaatatttgacacatgcataataggtaattctgctatgcatggtagtaaagttctatgttcagacctaacaacaaagtacaactcctgaaccctcttcgttattaaaattattgact

SEQ ID NO: 403 - DNA, 296 bp, Lilium asiatic
  Clone ID: LIB3229-009-P1-K1-H1
cggacgcgtgggctacccacgcgtccgtttatgagaacgagtataataacatgcaagggtggtgtttgcagttagccaatacaaatcaagaggtcaggcagttccacatgcaggctaagcagtataattagggcatatgagcagctagtatgaatggtcaatggcattattgctatgatggagtatgaatggaagaagaaacaatgattgtctatggttttgtagtttgtagtgctatgcattatgttaatgagcatgataaattttattgtgattgatatattagattatgaaac

SEQ ID NO: 404 - DNA, 299 bp, Lilium asiatic
  Clone ID: LIB3229-009-P1-K1-H12
cggacgcgtgggcttcaaatggtcgataagaaatacaatcagtgcttggaccagatgcagcatgccatatgttcatacgaaagtaccacagctgcagacacacctccaatgcttgcccgttttgccattcatagcatctccgctctgtacaaaaacttgagggagagtattgccagtcagattgttatgattaatcagcatcctggtggtgaacatacaggagaaaaagatagaacctttgaaacatcgtttatcaagaaacaaatggctttgcaacagctgagaagaacgagaacaat

SEQ ID NO: 405 - DNA, 420 bp, Lilium asiatic
  Clone ID: LIB3229-009-P1-K1-H4
cacgtcattagcatggcctttctgcatatgccacccacccgtaccaatacgcactcgctacctagaatctaaccattacctccctacccatctcacttctcagtcatgtatttcttcctctctttcactccttttttacaaagagatagagagagcttacatatctcctctcttatggtatattcttccaaaactctcttattgagctcaggacatacctcatgtggtggctatagctctgatgtgatgctcatatctccctttattatctccccatccccagacatcataccttatattttgcattctacattgatgaccacacctcatttattgtgcctagaatatgatatttatgaagctataagatgagagttgatgtatggatgaaggtggcataagttcttttgacgatcatga

SEQ ID NO: 406 - DNA, 411 bp, Lilium asiatic
  Clone ID: LIB3229-009-P1-K1-H8
gtgatgggtaaggcatggaagctttgcattgaagcaaatctaaatccgtggtgatcaagtaaaaagttccttggcatttaagttttagaaattagtgataatgacattcatggagggcctatagagaaggaatcacttgtgaggaagagcaagcctagcgtgggtctttgtgtggagggggttgtggtttagacttctcatatggagatagtctatggtagtgtagagaattcgtgaagcgatgttgctgatcgtgatgctaatgaagtgatgaagccatcttaagtgacttctctcacatgggtaacactaatcaatgtgacacttcactatatcataattaatcattcttctaattgtacttaaactagtcttccctgcctatgtttatgcatgtaacattcaatctat

SEQ ID NO: 407 - DNA, 369 bp, Lilium asiatic
  Clone ID: LIB3229-010-P1-K1-A1
ttttacctctcctcctctctttatctaatgattaaatacatcaaggagatgtcaaggcagtgcaagtatgtcaacaaagtcatgatggctcatttgttcaaaaagggtctaagatgggctcaaaaagtgtgtatattctctttactgatcaaatcctcacatacttatcatggattaaacactcaaaaactcttcaaggtaattacatcattggtgagtctagataatggtaaagttatcaaaactcattaaggtaatatattcaaaagataatatgaatactcaaagtctaagagtctagggtctaggactcaaggttatgtaatgcatgtgaactatccctaagtgaccaattatgcttaaaataaa

SEQ ID NO: 408 - DNA, 416 bp, Lilium asiatic
  Clone ID: LIB3229-010-P1-K1-A10
gcgaaaaggaacgtgaacagtgttataagcctattattgaggagctcaatcggctcttccctattcgatgcaaggaaaggcctccttcttgtcttgtacctggggctggacttgggagactggctttggagatttcatgtgctggttttgcaagtgaaggaaatgagttctcatattatatgatgatatgctcaagttttattcttaatcacactcaagctgctcgtgaatggacaattaacccttggatccatagcaactgtaattctttttcagacaatgaccaactaaggcccgttttttttccagatattcatccagccagtgcaggaattaccgaaggcttttctatgtgtggtggtgactttgttgaggtctacagtgatgtcagccaagaagcttcttgggatgctgtt

SEQ ID NO: 409 - DNA, 269 bp, Lilium asiatic
  Clone ID: LIB3229-010-P1-K1-A2
gttctaattagagcatactttacacaaatgggacagaggaataccttaacgagctgcaaaggatcgtcctgtgattgattctgatcaggatgactatgctccagcggcaaagcgtcttagaggaggagaggtaatgttgccaaacatatttcagaggatcgtggacagctttataaaagaatacagtaaggtaacatatttatttactaaacctgtgagtaagaaagaagcccccgattactatgacatgatcaaccgttcgatggatc

SEQ ID NO: 410 - DNA, 385 bp, Lilium asiatic
  Clone ID: LIB3229-010-P1-K1-A3
cccacgcgtccgtaggtacgtacctgttaagcgtgcaccctcaggtttcgttctattgagggatctgcagccagaggaagctgaggtgcttgcactcactgacacaccatcgactccggcctcggcggcagctggtactgggactgtagctggaagtcagccctcatcggcgatggcagtagatgaggagccccaacctcctcagccatttgaatacagcgcctgatgcaggattaatggtcatgtgctatatcagatgcgggactcaataggttttgtaaccttaacattatttcgttgttatgatgggctcatactgtttgtgtaaactttttgagtttattaaacatcccaaggtcatcaagtgaattgccattttagagtt

SEQ ID NO: 411 - DNA, 429 bp, Lilium asiatic
  Clone ID: LIB3229-010-P1-K1-A4
ggtgaaaccctagatcgccgccgacgttcgaactcgtcggccgatcctctcatccgcaatcatggcgcgcgagctatctcagaaggagaaggacatccagatgatgctcgctgccgacgttcaccttggcacgaagaactgcaacttccagatggagcgctacgtctacaagcgtaggactgatggtatatacatcatcaaccttggaaagacgtgggataaacttcacatggtagctagggctgttgtttctgttgagaatcctcaggatattattgttcaatctgcaagaccatatggtcagagagccgtcttgaagtttgcacactacattggtgctcatcccattgctggcaggcacactcctggaactttcacgaatcaactgcagacctctttcagtgagccccgtcttctcatcctcactgg

SEQ ID NO: 412 - DNA, 426 bp, Lilium asiatic
  Clone ID: LIB3229-010-P1-K1-A5
cccggaactccctactacatcacatctgctatatggggtgctggtggtggcgggctcttccccctttttcgcccaagaatttgcgctaagtgtcggttttgctgccccctaaatgtggctcagaagtcgagcgacctcgacaaaggcctctcggtgtccatgtccccctccgactcgagcgaagaagtcgtgcatctcctcaccgacctcaaaatcgagttcacatctcctccctcggacggtgggtcgccagtatggaagctcgacagctctgagcccaacggccaacgatatgtgacactaaacgggtctccgcataacgaaatcaacatggacaacatgttcaaaattgaaaaagttggtgtcatcggctacaaactgctatactgcccaagtgtagccggcgtccctgccgatggtccttgc

SEQ ID NO: 413 - DNA, 83 bp, Lilium asiatic
  Clone ID: LIB3229-010-P1-K1-A7
ccgacgcgctcgtgcatgcgacgttatagctttattatagtgtcacctaactacaattcactggccggggtgggcaactttta

SEQ ID NO: 414 - DNA, 82 bp, Lilium asiatic
  unsure (1)..(82): unsure at all n locations
  Clone ID: LIB3229-010-P1-K1-A8
naaaaaaaaaaaaaaaaaaaaaaaaaaaaaaaaaaaaaaaaaaaaaaaaaaaaaaaaaaaaaaaaaaaaaaaaaaaaaaaaa

SEQ ID NO: 415 - DNA, 286 bp, Lilium asiatic
  Clone ID: LIB3229-010-P1-K1-A9
aactgcagctgcattcacaaaagctggacgcgtcaacgctgtcattgatggggcgtgaccgtattgctgagcatggtgatacggttaataaaattgggacctccatccttgctatatgtgcgcactaccacggtgtaacatattatgtggcagtacctgtaacttcaattgatctgtcactcccttctgtacaacaaactgcactggaggaaagatcaccaaacgagtttttagatgctgattgatgactaggtaaacacgtaacagcatcttgaatctaagtctg

SEQ ID NO: 416 - DNA, 423 bp, Lilium asiatic
  Clone ID: LIB3229-010-P1-K1-B1
gcgccatagtagttttcagatgcacagatgataattgcatgtacttagtctcgatacccacaggttttcccgggagcatggactgctgttctagtgtcactggacaacgttggtgtctggaacgtccgtgtcgagaatctcgatacatggtacctcgggcaggaaacatacatgaaggttgtcaaccccgaggatactgccaacaaaaccgagtttggtgtcccagataatgccctcaagtgtggtcttctcaagaatctacaaacgccacaacagccttatgctgactcttcttcggcctcaactatactcgcaagatggaagttgcttattcctatggtattgatggctgcagttgcgctattattcccataactagttgagtttagcggcggtgtgaatttttagctgccttttttcttc

SEQ ID NO: 417 - DNA, 111 bp, Lilium asiatic
  Clone ID: LIB3229-010-P1-K1-B10
ttcatatgcccttgaaagatcctttttcaacacggaaagtacacttaagaggattgttatgagccagttctcacaaaaacctgcaatctctctaccagcttgggcaactac

SEQ ID NO: 418 - DNA, 329 bp, Lilium asiatic
  Clone ID: LIB3229-010-P1-K1-B12
cccacgcgtccggaagaagctgacctatgaggagaggaaggctagccttgtcaagcgtttgaatgccctcaatgatgccaacaatgatgaagatgatgaggatgatgattgagcttttgttaaaccgactttaaattcatagtttgtctggagagttgaacttggtatctttgcgtttttatgttatgttggcagtttgtgttggtaacttggttctgctctttctcaagtactctgaaattttgacttaggctgctcaataactttttaaacttggctatcatttgatatgatagggcgcttttattacatattgtggtggtttaaaa

SEQ ID NO: 419 - DNA, 401 bp, Lilium asiatic
  Clone ID: LIB3229-010-P1-K1-B2
aatgtgggaccggactttgattaatctctggtgatcgcattgcatcataaccagacgcaggccgtactttaacgttggttgatccactactcgatctgatggagatgtgatatctgatttcaccaactttctgaataagatgaagcgagctctctgtgaataacattcatataaaatattattgttcatactgctgacttatttgataacgtttaagggacaagattaatcatgatctctggtttgaattgcacgttttgacaatcctgcctaagaattatcactgatacttggaatgaacttggaacatcgaactggtgccgccctggaacaggagctataagtatggcgggctctataggatgtccatacttagttactagttattgctaattatacaa

SEQ ID NO: 420 - DNA, 237 bp, Lilium asiatic
  Clone ID: LIB3229-010-P1-K1-B3
ggaaaggggagcaagccagaggatttgggggaagagaagaaaagtgaagacaagccgggcaagaaaagaaaaaggaaggaagcgaaggatctccgattccaggaattggacgccgaggctgttcccttgagcaggaaagcccggaagaaagagtatctcgaagcaaggaagttgaaacacaagaagccaaagaaggatgatattccgagctttcctgggcatgaaaaaattgcattt

SEQ ID NO: 421 - DNA, 426 bp, Lilium asiatic
  Clone ID: LIB3229-010-P1-K1-B4
ccaatcgaagaacgttacaaagagtggacagagagaggaccagctaccaaccaacttgtgtattgtatcaatagcttcagagaagccgctttgtctagcgatccaaaatttgatcacattgacatagcagaaaagcaaaaggtcatccacgagtgttcggaggcagaggcttggttgaaacagaaggagcaacagcaggatgccttgcccaaatatgctaatccagttctgcttgctgctgatttgaaaaagaagactgaaacccttgacaggttctgtaagccaattatgacaaaaccgaagccaaagccggctaagcctcagtcagctcctccggcagagtctcaggctcccacgcctgaaggctcttctcagcaacctgaaggggagcccaatgcaagtgatcatgtgccggagcctatggag

SEQ ID NO: 422 - DNA, 398 bp, Lilium asiatic
  Clone ID: LIB3229-010-P1-K1-B5
ccttgttttgtttcaaggggggttgggagttggggccatttttgccataagaaccattgccactgaaaagaagttgcccacccaaaaggacaccacctccgtaggaatcaacaaggggatccagccgtgctgtaaccagtgtggggtttgaacgaagtcctttcctccattgtgcacctgccatgatgagatgtatatctgcccatcctggggcaagaactgcatgatgtcgccgaagttgatctatccgccgctatacatttgtcaggatctcattgtcaactactgcgatcacaactgtggcttgggaggcggagctgccacatttgagtaactagctgcgactatacgcagcagtttggccggtgaccatattgataagtgacggtctatctact

SEQ ID NO: 423 - DNA, 361 bp, Lilium asiatic
  Clone ID: LIB3229-010-P1-K1-B6
ggagctcatggaatccctgaaggagattgattttctggttgggaaactacaattccccacaggagaagaaatgaagcttatagatagaaaactgaagagctgccgggataggagctcacatgagaaaaaacgggaaaagcgatcgaagcacaaatctaaaagaacagctagtgagatggaaggagcgcctgcagagtagttttttggcattgttgaaagagtttaatagttatactagctcggcagtttcggtggatgagttataatatgataactttctttttttcgtggattattaaagagctaatggattctattaaaattaggcggtttctaccgctggattatctatggacaaaaa

SEQ ID NO: 424 - DNA, 424 bp, Lilium asiatic
  Clone ID: LIB3229-010-P1-K1-B8
gcactatgtgatcttgctcttcgatttggtgaaggagacgaggaatctatgtcacgtccttttggggtgtctcttctcatagctggacatgatgaaaatggacctagtttatattacacagacccatctggtacattttggcagtgcaatgcgaaagctattgggtctggctcagaaggagctgacagctctttgcaagagcagtataacaaggacttgacccttcaagaagctgaaacaatagctctttccatcttgaaacaagtgatggaagagaaggttactccgaacaatgtggatattgcaaaggtgtctccaacctaccatctctactctccttcagaggttgaagcagtcattaatcgcttatgagagagctgtttgcatctgtcctccaatttctgcgacactcactgttttgcct

SEQ ID NO: 425 - DNA, 413 bp, Lilium asiatic
  Clone ID: LIB3229-010-P1-K1-B9
agaaaacataataaaaaatggaaatgaatttaaaaataattataaggtgtaagtttacacaagaaaggataatggttttgccagcatagagaagaaatctgattaataaacaatctgaggacgacagataagcagtaccgattacttacattgtttggtatcatcaaagacctggaccaaacccaattaggtagaaggcaaaaatgatagaaaatatgaagagataaactgtccatcacaagcaatggactttccatctcctctccctattctgattacttgcggattgaagactgcaccccacctcacacatacataataacagtcgagtcgtacaatcttgcgagctgagcgggtagcagtaaaaaagcacaatactagcatctctttcaggtgattgcagctggaatggg

SEQ ID NO: 426 - DNA, 291 bp, Lilium asiatic
  Clone ID: LIB3229-010-P1-K1-C1
ctatgagatatagagcgatcaaaagggtagatcaaagctcgatgctagttacatcgcgagtggtaattcatacacccacttcactggaggccctgggagggatcacttcacacaatatcctgactgataaaacagcgccggtggtcaagggaataccaaatcattacatttctcttttgacagatggcatggtatgagcgaggatcagatcggttgtgacattggacacattttcacaacttatttggcaatgggatcaacctcggacgccacattaatggctttagtggt

SEQ ID NO: 427 - DNA, 333 bp, Lilium asiatic
  Clone ID: LIB3229-010-P1-K1-C10
cccacgcgtccgtttttatttaatttttaaatgaaaattaaatcaacttattaataagttgaagatacataacatatatgtaatgtcactaaattggtggacatttcatattcaatcactattggaattcgaattttagtattcccagtgttaggctcgtatttagaaaggcaagtcagtttaagtatgaatattagaatttgaatattctaagggtcagtttcttagtcggactgaatagtattcaaaatgttggaatggttgatattcaaaatgttgaatgtctatcaagtggtactttgtatccgactatagaaaggaaactacattgtg

SEQ ID NO: 428 - DNA, 420 bp, Lilium asiatic
  Clone ID: LIB3229-010-P1-K1-C3
gtccgtctcttcaggcggcggcgcggaagctcagattacgatggcggatgaggaacagcagcctcttaactatgtccacgagacggtactgaagaagaggaaaaacaatgatgagtgggctctgaagaggagggagaggttggatgctcagaagcagaagactaaagataagaagaaagctgcgatcaaaaggcctgaacagtttgtcaaagaatttcgtgacaaagaattagacttcattcggatgaagaaaaggctaaaactaagaaagacttcacattatgacctcaagtcaaagctgctctttgttattcgcattcatggctcgcaagacatgcatcctaggtctagaaaaatcttgaattcattgaggttgagacaaaacctcactggtgtgtttgtgaaggttaatgaagcaac

SEQ ID NO: 429 - DNA, 250 bp, Lilium asiatic
  Clone ID: LIB3229-010-P1-K1-C5
gttgcgagagtcgtgtccacaccggactcaaggatcgagaaattgatgaaatttaggttccaggccacaaataacgacgaagcagaatataaggcaaatattgccggactaaagattgctttaatgttgggactgttcacctttgaactgttaagtaactctaaaattgtgataggctagataacaggaggaatggaagcccatgagcctaacatgaagaaatatctagaagtagtacaattgtacctat

SEQ ID NO: 430 - DNA, 420 bp, Lilium asiatic
  Clone ID: LIB3229-010-P1-K1-C6
cccacgcgtccgtatgatcaggcccttcaaagtgatccagatgcaaagttacctgttacacttgcacttgcgagcttgtggatccggagaaatcatgcagacagctatctggttgaaataattgattcacttccccaaatctaccagagaattgagaactgggtggaggacgtgctcttggacgaaggcaatgcgactataataaccctattcatctgcctcctgactgtcctctacctccgtgaccgacacaggcgtcaagtcgcagccgccgttccgcagcaacccgacgatgctctgaactagagaacggagaacaaattatttgataactgagttgtagaattaatcccgggagaggcaagctactgcgtccctatgcattgttttgtgacaacattggtcaatagtagaagtata

SEQ ID NO: 431 - DNA, 408 bp, Lilium asiatic
  Clone ID: LIB3229-010-P1-K1-C8
cgtcaaggacggcttcgtcatccgcaagccccagaagatccactcccgaggccgggccaggcgtgctctcgaagccaagcgcaagggccgtcactccggatacggaaagcgcaagggaacgagggaggcgaggttgccgactaagattatttggatgaggaggatgagggttttgcgccgcctgctgcgcaagtaccgtgagtcgaagaagattgacaagcatatgtatcatgatatgtatatgaaggttaagggtaactagataaacattaaaatggtgcctgaggagagcattcacatgttgaatgcttaaaaagtgagggagaaaatgctgtttgaccagtataaaaaatttttgttctaagagcgatgatcaaaaaaatcaggaagcttgttatgaaggattat

SEQ ID NO: 432 - DNA, 438 bp, Lilium asiatic
  unsure (1)..(438): unsure at all n locations
  Clone ID: LIB3229-010-P1-K1-C9
gcggacccaacagcgtctcgcggaccgccgtgnnggctttatattttttatattttgatacaccacaacgtannaaagaaatgggtaaggaagaaatatatactaatgcagaataagagataagaactaaaactcgacacactatcanntaatcatttaccacatttatttttatcactccatgtctttttttttaagtctgatttctaataacccaaaagctctcaaaanaaaaaaaaaaaaaaataaaaaaaaaaaaaaaaaaaattggggcggccgttttaaaaggatccaagcttacatactcgatcatgcaaacatataaaatttttaataaagtcacctaaaatttaatttactggcctgggggtgtacatctaggggacccggaaatccctggctttattcaacataatatgctttttaatttttcccctt

SEQ ID NO: 433 - DNA, 89 bp, Lilium asiatic
  Clone ID: LIB3229-010-P1-K1-D10
agcgacgcgtcaggcggacgcgtaagcacaatacttaaactatttgtttgaataagaggattgataaaacgtctaccctaaaggacagg

SEQ ID NO: 434 - DNA, 417 bp, Lilium asiatic
  Clone ID: LIB3229-010-P1-K1-D11
tgtaaaatgataagacaccctttttttcgcccatccagcaacatccaatcgtgggcagctgctgcaacatttcaaagtaactgcagtggaatgggttctcaagttgtctgcattccaaaactggatttctccgatctagtgctggtaaacactacaggctgggatgccctgcagggcgaggtgatgcgtgccctcgagtcttacggctgctttgaggttgcgtacgacagggtcaccccggagctccgggatgctcttttcggccgtgcctggccggaaatcttcggcctttccctggacgttaagttgctcaacaaatccgatctgtccctcgacggatacatcggacagataccaggattatctttggagagtttgctagtcccagatgatgttgagaagtttgctcgtttgttt

SEQ ID NO: 435 - DNA, 171 bp, Lilium asiatic
  Clone ID: LIB3229-010-P1-K1-D12
aagactatttagtaatactttggtatttatggtttatttttattttcttgtacggtaaggatatgttgtttcgggaactttttttttactgtatttgttgatagtatgctactttttaggatattttttctgtatgagttgtttgtcgtgaatatgttttcattatgtttt

SEQ ID NO: 436 - DNA, 275 bp, Lilium asiatic
  Clone ID: LIB3229-010-P1-K1-D2
gtccccttcctctacccggactaagcagcgcgccgccatggctccaagttctttcaagctcgctcaccctttcgagaagaggaaagaagaagctgctcgaatcagagcaaagtatcctgagagaattccgataattgttgagaaagctgacaggagcgatatcccagccgtcgacaagaagaagtatcttgttcctcctgatctaactgttggacagtttgtgcacgttgttcgaaagaagattaagctatccgcagagaaggccattttcattt

SEQ ID NO: 437 - DNA, 372 bp, Lilium asiatic
  unsure (1)..(372): unsure at all n locations
  Clone ID: LIB3229-010-P1-K1-D4
cacgcgtccggggaacactaagatggttcttgttcttgctctgtttcttggggggtgtgtgctgggactcgcaaggagaacattgaangagaatcctgacgtctaccaccctcagaacttcttcggtttcggcggtgtcatcagtcctggttctggctctagctttggcggcatggttcctcttggcccggggtttggaggcgccggcaatgtcccggcggcttcggcaggaggaattattgttggaggcaaaactgtgaagccataatctggtcggttgtttcagcagcgatgtaagggagttgggttctagttcagttaagtgtgtgttattaggtcaagttaggttcagcactcggaattattttgggg

SEQ ID NO: 438 - DNA, 179 bp, Lilium asiatic
  unsure (1)..(179): unsure at all n locations
  Clone ID: LIB3229-010-P1-K1-D5
cggacgcgtgggcggacgcgtgggtcaaggttgttagatcgtgtgtagaacttatggtttctatatttctaatggcctaaatatatnnaaaaaaaaaaaaaaaaaaaaaaaaaannnaaaaaaaaaaaaaaaaaaaaaggaggcaccactaaaaaaaaaaaaaaataaatacaccagaa

SEQ ID NO: 439 - DNA, 408 bp, Lilium asiatic
  Clone ID: LIB3229-010-P1-K1-D6
cccacgcgtccggcgccgcggggggcggggattgtggctgccagggtgccgaagaaggtgctccagtttgctggaattgaagacgtgtttacgtcttctcgtggatctactaagacccttggtaactttgtgaaggctacctttgattgccttatgaagacttatgggttcttgactcctgatctctggaaggagactcgctttgtcagatctccgttccaggagtacacagacttcctgtcgaagcccgtgaaggcagttttaattgaggatgttcctgagaaagtagaagcttaatgtggtttaggtttgagttatgattttggttatgcattttcgtctcttggttggatcttaagacaagttttaagtttgctacattgtagatggctggtttggtggtttggg

SEQ ID NO: 440 - DNA, 420 bp, Lilium asiatic
  Clone ID: LIB3229-010-P1-K1-D9
tccagatcggctgccgagatgtcgaagcgcgggcgcggaggttcggccgggaacaagttccggatgtcgctgggtttgccggtggcggcgacggtcaactgcgccgacaacactggtgcgaagaatctctacatcatctcggtcaaggggatcaaggggcgcctcaatcgccttccatctgcatgtgtcggcgacatggtgatggctactgtgaagaaggggaagccagatctgaggaagaaggtgatgccggctgtcattgttaggcagcgcaagccgtggcgccgaaaggatggtgtttacatgtacttcgaagataatgctggtgtcattgtgaacccaaagggagaaatgaaaggttctgctatcactggacctatagggaaagaatgtgctgatctctggcccaggattgcaagt

SEQ ID NO: 441 - DNA, 390 bp, Lilium asiatic
  Clone ID: LIB3229-010-P1-K1-E1
cccacgcgtccgaagaaccgttcctcaacctgatatatgatagcgatcctctaccccaaatcttctgggataatattgtgttggtaggagatgcagcacaccctacaacccctcatggtctgagaagcaccaacatgtctattcttgatgctggagtcttgggccgctgcctcgagaagtcgagatcgggaaagttgggttcagctctggaagaataccagaagattcggctccctgtcgtcgcaaagcaagtgctgcatgcgcgacgattaggacgcacaaaacaaggtttaattcttgatgacaaaaggagctttgatccaaagatggcaactgaggaggaatgcctacagcttcagcaaagaaacatgtattactggagctatgctg

SEQ ID NO: 442 - DNA, 401 bp, Lilium asiatic
  unsure (1)..(401): unsure at all n locations
  Clone ID: LIB3229-010-P1-K1-E10
gggaggtttgctgtgagggacatgaggcagactgttgctgtcggtgtcatcaagagtgttgagaagaaggatcccactggagccaaggttaccaagtctgctgtgaagaagaaatgaatcgaagggatttctgcactggttttcggtttgcttgttgttggtggtcttgagtttgtgtcgttttggtgttgtgagtctgctgcttctgtgtcggggatctggttgcagaactgggttcttgatcgtcggtggcgtcggtttgtggtttgttttatttctgcatcttcatttcagtctgctgggtcttagtgttgtgtcctgcttttgtttgcgatgctggtactgctgaacttgtgagtcatctttatgggtgtttggtattaataaatggtgtnttaagt

SEQ ID NO: 443 - DNA, 113 bp, Lilium asiatic
  Clone ID: LIB3229-010-P1-K1-E11
ctaggtctagtgcgcgggccttcattctagctgatccaatctgacgcacgcggggatgcgacatcatagatctcatataagccaaccttaccaaaatttactggacgaagtaa

SEQ ID NO: 444 - DNA, 195 bp, Lilium asiatic
  Clone ID: LIB3229-010-P1-K1-E12
cgcactatcccttgcaggtacctcttttatcacataaagtgcactcctgggaagggttgttatctaatatctatgtaaaaccatgccaatactccatatatcggttcaccaacaaattacatgtacaaattataacactggtagctgacctaattgttcctgctgatgccatactccttaatacttctcgaataa

SEQ ID NO: 445 - DNA, 425 bp, Lilium asiatic
  Clone ID: LIB3229-010-P1-K1-E3
gcatggggcgagggacacaattcatgggttagtggagttgcttttgattcatattggttggctccaaattcagatgaaacagaagaaaatattgtgtaccgatttggttctgttggtcaggatacacaattgctcctctgggacttggctaaatgaaattgctgttccactgcgaggtccgccaggcgggtcacccacattcagcagcggaagccattctgctcactgggacagtattacccctgtaggcacccttcagcctgcaccaagcacgcgggacgtgcctaaactctcacctcttgttgcacaacgcgtgcatgtggagcccctctctggcctgatgttcactaatgaatcggtgctgactctttgccgggaagggcaaatcaagatctggtcgagacctgggcaagactaaaccactc

SEQ ID NO: 446 - DNA, 169 bp, Lilium asiatic
  Clone ID: LIB3229-010-P1-K1-E4
gcatggcgctagggacacaattcatctcttagtcgagtagctcttgattcatatgggttcgctccaaattcattttacacacaacaaaatattgtgtaccgatttggtactattggtcaggatacacaattgctcctctggtacttgcctaactgaaaacgcttttcca

SEQ ID NO: 447 - DNA, 418 bp, Lilium asiatic
  Clone ID: LIB3229-010-P1-K1-E8
gtcgacgagataaacagagtttaggttttctcgcttgaactaagatgggtcgtggagttagcagtggcggagggcaaagctctctggactacctttttggtggtggagaggctcccacaaagcccgctgctaaccctccagctgctgacaatgctgggactgttgataagtcctccggtgctccagctcctcttgacaacggcaagcaggttcctgctggcatacaaggaaacacagcaaggaatgcaaacaactactttagagctgatggccagaatactggcaacttcctaacggatcgtccttccaccaaggttcatgctgcacctggtggtggttcctcccttggctacctatttggtggcggtagcaactgatgggattactatgctgctttagaactgcaccaagtgattgc

SEQ ID NO: 448 - DNA, 307 bp, Lilium asiatic
  Clone ID: LIB3229-010-P1-K1-F10
aaacacactacagatatgatcttttatcacataaatatatgaattatgaatataggaattatggggattagaaaaactcctatttttatggatcaacagtacaagtaaaggagaaccgggagattccatatctatataatttcaatacatcgaaacctgacgcattttatctattggtaagtacaactattagtgattatttagaggaaagatatcctatttgatcgaatattaatcgggatagaaaatattttgattggttataattctccatttttttgtccttataaaaaaaatatttggatat

SEQ ID NO: 449 - DNA, 318 bp, Lilium asiatic
  Clone ID: LIB3229-010-P1-K1-F11
ttttggttgaacaggtgaaggaacttcagaatgagctaaagcttgctcacagcaccttggcagagcagaaagaattggttttgggaaaggaggcagaaagggaggtcattgtagagaagtcagttgttgatttagacactgaacgtcaacgtgccaaccttctggaaaaacaagtagaagagctgaatcagaaactgcaaaaatctgaagctcagtatgcagaaaaggaccaagcagagctcaataatttgaagcttaaactgaattaggcttgtgaactggagaaaaaaattgtagagctcgagaatgatttgaagt

SEQ ID NO: 450 - DNA, 389 bp, Lilium asiatic
  Clone ID: LIB3229-010-P1-K1-F12
cgcaaaggcccttgcaggttttcttttcaacacagaaagtgcacttgtgagaattgatatgagcgagtacatggaaaagcatgcagtttctcgtttggtcggtgcaccttctggttacgttggctactaggaaggggggcagctgaccgaagtggtccggtggaggccatactctgtggtgcttttcgatgaaatcgagaaggcgcatcatgatgttttcaacattcttctgcagttgttggacgatggaagaatcactgattcacagggtatgacagtcagttttacgaattgtgttgtgatcatgacattaaacatcgggtcacactttatccttggatactcttaaaagcacacggggtaccaaggaggcttgtttttaactgatg

SEQ ID NO: 451 - DNA, 301 bp, Lilium asiatic
  Clone ID: LIB3229-010-P1-K1-F3
gccgctcgaagaaaacaggatgctagtttggcaatcggcgaaaccctaaaatgagggcggggaggaagaataatctgatgaggaggctgaagaggaagcgccgtaagatgaggcatagatccaagtagatgccgctgcaggactgtaatgcatgcatcgtggcttactgttggattaagttggctcttttattgttaagtttggtgttttaggggactgactatctggttctttatgtttaaattatgaagatattaattctcagtttatttaaatttcggcactttttataataataaaa

SEQ ID NO: 452 - DNA, 428 bp, Lilium asiatic
  Clone ID: LIB3229-010-P1-K1-F6
gctcaaaccactcatcaatcatgtcaggacgcggcaagggagggaaggggctcggcaaaggcggcgccaagcgtcatcgcaaggtgctgcgggacaacatccagggcatcaccaagccggcaatccgccgccttgctcgccggggcggagtgaagaggatcagcggcctcatctacgaggagaccagaggggtgctcaagatctttctggagaatgtcatccgcgatgctgtcacctacacagagcatgctaggcggaagacggtgacggcgatggatgtcgtctatgctctcaagcgccagggccgcaccctctatggatttgggggttgatcttttcctgttctatctggatctctgtttgtctgttttgaatttggatggtcatttgggttgtgagtgtctgctgtttcatatttctcgtatgaa

SEQ ID NO: 453 - DNA, 287 bp, Lilium asiatic
  Clone ID: LIB3229-010-P1-K1-F8
gtccgaagccggtgttgctgctactgggtctgatccgtttgcttcgtcagctcctgctgaggaagatgacctctatagttaaggttggtcttatagtaaaaacatatgggttgtgtgccttgctacgtctctagctctacctttggttttatagtggtgagactttgcatgagatagggcaatggtcttgatctgacttacttttgttaattgattttaactctttgaaatatttatctcatgtgttccagcttattatattttgaatatagtcatctcattttagc

SEQ ID NO: 454 - DNA, 425 bp, Lilium asiatic
  Clone ID: LIB3229-010-P1-K1-F9
caagaaagcgatgtctattcagtgcaaggtgtgtatgcaaacattcatctgtaccacatcagaggcgaagtgcaaggaacacgctgaagcaaagcatcccaaatcagagctgactcagtgctttcctcatcttaaatcatcataagagtgatccaagttaagaagcatcctgctccatcaaatcaacttatgtctatatatttcatctagagttgtgtaattgaaaccttgaatggtgtggaaacaatgctgtgtttgcatatttaaaccgagttttatgctgctttaatatcctagccaacaaaaaaaaaaaaaataaataaaaaaaaaaaaattaaaaaaataaataattaaattaaaaaataaatattaaaaaataaatattatattattattttttatatataaataattttaaggggcgg

SEQ ID NO: 455 - DNA, 423 bp, Lilium asiatic
  Clone ID: LIB3229-010-P1-K1-G1
cccacgcgtccgaaatttttcatcaatcttgttaggccgcggcaagggagggaaggggctcggcaagggcggcgccaagcgccatcgcaaggtgctgcgggacaacattcagggcatcaccaagccggcaatccgccgcctggctcgccggggcggagtgaagaggaacagcggcctcatctacgaggagacccgaggcgtgctgaagatctttctggagaacgtcatccgcgatgccgtgacctacaccgagcacgcgcggcgcaagacggtgacggcgatggatgttgtgtatgctctcaaacgccagggccgcaccctctatggctttgggggttgatctgtatctgtttattcggatctctgtttgtttgttttggtggtaggttgcgttgtggaccattgaatttcatgtatcttata

SEQ ID NO: 456 - DNA, 148 bp, Lilium asiatic
  Clone ID: LIB3229-010-P1-K1-G10
cggacgcgtgggtcctcctctccctcaacctcttcttctccgtcgtctcctgcggccattacgtgccctgcccacctccccccttcaagcccaaaccccatcccacacccaaaccggccgtcccctcctgccttgggaataccttaaa

SEQ ID NO: 457 - DNA, 262 bp, Lilium asiatic
  Clone ID: LIB3229-010-P1-K1-G11
gaggaagcagtcccaggctcaagaggcttatgatgaagatgaggacatgccgggaggtgctcaaagggtgcagtgtgctcagcagtaaggagatgatgatgatagctggatgtttaggatctgaatatgctgtcagttaacttttatccactctatatttttatggtatatcataattgtcaccttgttcagtcgttacagatctgaacttgtaacttcttgcttaagactatcttggttttataagtttggtattctgaaa

SEQ ID NO: 458 - DNA, 425 bp, Lilium asiatic
  Clone ID: LIB3229-010-P1-K1-G12
cggacgcgtgggtgggaagttgcccttgctgtagaatctaatgttgcccatcaaaggggtcattaccctctgtctacggaatacttgagctatgctgagaagttaaatggtaatctcgtggaagctttcaaaagcatgcaaacttatgaagagggcttaccattagaaaatggaaatttcgctcacgaggtgaccgaagaggatggagaagaggaaggtcacggagaggccgatgttgatgttgatgagtctacagacagtgctgtccttgttaatggggaaggagatgggggtacgaatgatgaagggactccgtcaccctaaggacaattatacaaatgtaaaatcaaaattttgtatctggtgactccttgttttgttaggacagtaacctttgtactgttgtcatcctaaggaacgggtgt

SEQ ID NO: 459 - DNA, 393 bp, Lilium asiatic
  Clone ID: LIB3229-010-P1-K1-G4
ctcttccgaagctgtatgcgaagattcagcactgtgtctcctgcgcgatccactctcatgttgtgagggttcgttcccgcactgacaggaggaaccgtgagccgccacagcggttcagacgcagggaggataccccaaggcctgctggtgggccgcctggtcaaggaccaccacgcccagctggtgctcttggagctgcagttcctgctgcccgttgatgataagtgttttgttgctgcccgttgatgatcagtggtttgttggaggcttttgtcaattttggtttaatctgagtctggtacttttacaaatctatgtagatttgtatttggtggacctaaagattaatggggtcttaaattttggccatatttaaaaaaaaccctccttttt

SEQ ID NO: 460 - DNA, 375 bp, Lilium asiatic
  Clone ID: LIB3229-010-P1-K1-G5
cacgcctccctcaattgttacgaggagtaacttgaaacatatatattggacagtaactcagcaactagctcaccacactatcaatgggtgcaacttaaggactggtgatctgcttggaaccgggaccatcagcggacctgatccagaatctctgggatgcttgctggagttaacatggaatgcacaaaaggccattaccttagatggtatagagcgcaagttcttagaagacggagatgaagttatatttacgggatgctgcaaggggaaggattacaatgtaagatttggaaactgcaccggtaagatccttccagctatcccttgagacgtctcccaacaggcttgatgtttctcctgtatcaaaatttatgt

SEQ ID NO: 461 - DNA, 389 bp, Lilium asiatic
  Clone ID: LIB3229-010-P1-K1-G6
accaaagttggtgattgcgtcatgtgcccgtaacgacggcctgtgcctatgacagggtcgactaagccaacgactacgacacatctgattttcttctctttcttgcttccactcgtctttccttctccttatggctgtgggcatcccagtgatgaggtatgcagctgcggttgtgcttgggcccactgtctgcatgtgtcgtggtccaacatagacgcgacctatgttggcggttgtgcctgttggcagcacgacaatgcactaggccagccgacacatccggaccgactgcgctttgctcgactccggtgagaggggaggagaaaggctggaggtgcgcgacatgcaacatgtggcttttgtgaaagaggagggaaaggctgggtatg

SEQ ID NO: 462 - DNA, 377 bp, Lilium asiatic
  Clone ID: LIB3229-010-P1-K1-G8
gttcatcgtttattcaattgggaagccattggatgcgtggctcaaggacatgcctgctatagcctgaatgagaactgaggcagtacaaattgttgggagtggaggtctctttatttgagtttgacaggttcaaattatggatttttttgaaattgttgtttcctttgatattgtcgggtacttatggttttctggattttggtctgtagtgaagatggagccatggttgcaggcggcgccttttgttgacattgagagctcaagtcttgtctgtttagtcatcagattcatctattgaatctgcttgtattttgttatcaaatattattacgatattagcacaattcaatgcaaatccaacatcagggtgttgagaa

SEQ ID NO: 463 - DNA, 373 bp, Lilium asiatic
  Clone ID: LIB3229-010-P1-K1-G9
cccacgcgtccgcccacgcgtccgctcgaagatacatgggtcaccgtctcaagtcgataaagccggacaagggtgtgatgtcgaaatccttcggagacccctacatgggttgggcatccttcgtggaagacgtcgtggtcacccaccagacaagaactggtcttccagagcatacctttccgaattatgatctgtgggagaatccgctcaccccgtgcatgtgtagagcatgagagagattgatgtagttttggtgtagatttcatgtcatattttccgtctacattatgtttccccctcgtgtgtcaggggattgttgtaggttttcacgtataattcggtgctctctatttttcgagggtcttttcagcaa

SEQ ID NO: 464 - DNA, 417 bp, Lilium asiatic
  Clone ID: LIB3229-010-P1-K1-H1
ccgaacagcagctgaggggcttcgacggctccgaccccagcaggcccatctacgtctcggtccgcggcaccgtctacgacgtcaccaccggcaagggcttttacggccccggcggcccctacgccgtcttcgccggtcgggaggcgagccgtgcgctggccaagatgagcaagagcgagcaggacgtcaacggcgatctctccggcctcaccgagaaggagatcggcgtgctcgaggactgggacaagaaattccaagctaagtatccccgttgtcgggcgcctcacctctgtataattttaggttttaactatggtgccctaaattaggtggtggtgatgggatttgttcaatatagcaacatggatttatgcttaattgtgtgaaagggggttttaataagagaaagttttatgg

SEQ ID NO: 465 - DNA, 195 bp, Lilium asiatic
  Clone ID: LIB3229-010-P1-K1-H10
ccgatctatagttacagaggaggttcgcatccaaacaagcattctagtctccttagcttttaagatttaggattagagatatccaataatgtctaaatcttgaaagtttttggtgtttgatatctaggtctaataagttttctttgacattccttggtttctggatagtgttacggttggctcaatgattttagg

SEQ ID NO: 466 - DNA, 424 bp, Lilium asiatic
  Clone ID: LIB3229-010-P1-K1-H11
caaaaacactgaatggcgtatacaagatgcattgcacaattctgaatttgatgtgtcactggagaaggacacaaggcggaaagagattactattcaatgcaaggatggaaaggagagggccggagagctccggctagggaaaagtaaggttgcaaaggttacgaggaatcatttatatgatgatgtgtctgatagggaacaaggagctgggaatggtggcactgagacagagaagaggaaggttgcctgggataagaggaatgatttatatgttgatacttttggtagaccacaaggagctaagaatggcgcaactgaaatagatcaagtattcatgatgaagaagaataatgaaaacactgctgctaagcacatgcctgagaaggacacaagcaagaaaggtattagtagccaatgcaaggag

SEQ ID NO: 467 - DNA, 423 bp, Lilium asiatic
  Clone ID: LIB3229-010-P1-K1-H12
gaggcatgcctggtatggaaggcttgggcggcatgggaggcatgcctggtatgggaggcttgggcggcatgggtggtgcagatgatgattttgaggatgacattgaagataaagacgatgagatggaagatgagaaaactgaagaagcaccacttactacgaaatctggagcttcggaggctgctgatgaatctggacccccaccagctgctgctaattaaatccggaaagtgagagtacctgatgagatccttctttctctatgcttctgtggtagtgaagtatatagggtccattgacatgagtgaatgctagcttagtgttttaatgtgtacttactgttgagtgtagtaatactcagcgttaagttatgatgcctgtttgtctttttataatacttttctgtcggtggtggtatatttg

SEQ ID NO: 468 - DNA, 429 bp, Lilium asiatic
  unsure (1)..(429): unsure at all n locations
  Clone ID: LIB3229-010-P1-K1-H4
ctcgccgccgatctctgatctccgatggcccgtaccaagcaaaccgctcgcaagtccaccggtggcaaggcccctcgcaagcagctcgccacaaaggctgcgaggaagtcggcgccaaccactggcggcgtgaagaagccgcaccgctaccgtcccggcaccgtcgccctccgtgagatccgtaagtaccagaagagtacggagctgctgatccgaaagctgccgttccagcgtctggtgagggagatcgcgcaggacttcaagacggatcttcgtttccagagccatgccgtgctggcgctgcaggaggcggcggatgcgtaccttgtggggctgttcgaagacaccaatctttgcgcaattcatgccaagcgcgttaccatcatgcctaangacatccagcttgcgcgtggatccgtggggagcgcg

SEQ ID NO: 469 - DNA, 405 bp, Lilium asiatic
  Clone ID: LIB3229-010-P1-K1-H5
acgccggcggcggaatgaacattcaagatatttttaacaatttctttggaggtggtggtgcagcagaggaggaagaggaaaggattccaaaaggtgacgatgtgattatcgagttgcatgctacattagaagatttgtacatgggaggatcattaaaggtttggagggagaaaaatatcttaaagccagctcctggtaagagacgatgtaattgcagaaatgaggtccaccataggcaaattgctccaggaatgtttcagcaaatgacagaacaggtctgtgagcaatgtccaaatgtgaaatacgagcgagaaggctatttcataactgttgatattgagaagggaatgcaagatgggcaggaagttgtattttacgaggatggggaacccaaaattgatggag

SEQ ID NO: 470 - DNA, 423 bp, Lilium asiatic
  Clone ID: LIB3229-010-P1-K1-H6
ttaatgatgcattctcgctctcagcaatggccgcacgtggcaaggcggtcggctccgcggcggcgaagaaggcgacctcgaggagcagcaaggccggtctccagttcccggtcggccgtatcgcccgcttcctcaaggccggcaagtacgccgagagggtcggcgccggcgctccggtctatctcgccgccgtcctggagtatctcgcagccgaggttttggagttggctgggaatgcggcgagggataacaagaagactaggattgtaccgaggcatattcagcttgctgtgaggaatgatgaggagctttctaagttgctggggatggtgactattgctaatggtggggtgatgccgaacatccacaaccttcttctgcccaagaaggctggttcgtcaaagtcggcggctgctgatgagg

SEQ ID NO: 471 - DNA, 389 bp, Lilium asiatic
  Clone ID: LIB3229-010-P1-K1-H7
agcggagaagactgggaggagaatggagacaatgacactcaaaacagcgagatcatcgaggtttgctctgaaaccacacggcaatctaggaacaaggcatcttcgatatcacgcctatggaggtcatcgtgcccgaataatggcgaaaactacaagaaaatcttagttgaggcaataaatggaaggctatcagtcggaaggacctctaccgggaccctgtctcccgacataaggtcaggcgacatcgatcttagcccaccgagcgtcgggcactggagctcccccgatgcagcaaaccctcacataactcgaggaatgaaagggtgtatcgaatggccaaaaagcacgcagaagcatagcttgaaagcgaagcttttagaggcaagaat

SEQ ID NO: 472 - DNA, 388 bp, Lilium asiatic
  unsure (1)..(388): unsure at all n locations
  Clone ID: LIB3229-011-P1-K1-A1
ttgngttggtacccgggaattcggccattatggccgggtacgtggtgcagaagacaaaggatgtgggtcaagagattcatagcagggttgaggaagggatgaggtccgcctctgtacaacatgaacgactaacaacttaaatatctatcaacaacaataagaagaaagaagatgaagaagcccatgttttttatcttggctatgttcttgctcttaaataaaacagtttaaatgttggatgttctctctctgttataagacttgtttaaattcttggataggttctctagatcttatggtaaatgtttgttcattcttttattaatcttctgttatttactaccttttttttagaataattttttgtgtcgtaagataaaaaaaataa

SEQ ID NO: 473 - DNA, 429 bp, Lilium asiatic
  Clone ID: LIB3229-011-P1-K1-A10
gtccaccttggtcaactcatccttcgatcgaaagcaagctcgagatcgccatgggagaagctcgcaagatcggcgtcgccctcgacttctccaagagcagcaagcacgcgctagcctgggccgtcgagaacctcctcgacaagggcgacaccctcatcgtcctccacgtccgccaccacaagggcgaggaatcgaagaacaatctctggtctaaatccggatctccgctggtgccgttgaaggagttccgggagccggaggtgatgaagcactatgacgtggagtgtgatatggaggtgctggatctgctggacactgtgtcgaggcagaaggaggtgacgatcgtgatgaagatttactggggggatgcgagggagaagctgggccaggccggggaagatatgaagctggattcgctggtcatgggga

SEQ ID NO: 474 - DNA, 230 bp, Lilium asiatic
  Clone ID: LIB3229-011-P1-K1-A11
cggacgcgtgggcgcttgatcagttggcatcatgtattatgtttgttaataatctcagattttaagcaatggctcgtgttgggtcgaattttaagcaatggctcgcgttgggtcgaattttatgaattttaagcaatggctcgtgttgggtcgaattttatgtacaatcattgcttatgttcttatgactcgatgatctatctaaattggttatgaagacatttgggaat

SEQ ID NO: 475 - DNA, 167 bp, Lilium asiatic
  Clone ID: LIB3229-011-P1-K1-A12
cgattcatgaaatttcctgagttacaatatgtcccctatattcggttaataatgaagtggtatttataaactatacaatgtgggtttatgctgaatctgttaaattggtactacatattaagtgtaacttttgaagtaattaacaatttgattcggagatttaagag

SEQ ID NO: 476 - DNA, 443 bp, Lilium asiatic
  Clone ID: LIB3229-011-P1-K1-A3
taccgaattccagggtcggctcagagcgcacccgttagctcggatctctctcgatccttggccatgacgaagcgcaccaagaaggctgggattgttggcaaatatggtactagatatggtgccagtttgcgaaagcaaattaagaagatggaagtgtcccagcatgcgaagtatttctgtgagttctgtggaaagtattctgtgaaaagaaaggcagtagggatttggggttgcaaagactgcgggaaggtgaaggctgggggtgcttatactctcaacactgcaagtgctgtcactgtgaggagcaccatccgtcgtctgagagaacaaactgaaagttgatcaagagaagcaactatatcagtgtccctagttttaactctaccctttcagtttatttatcttttgagaactatgggttaatgcagtaagaattgtcattc

SEQ ID NO: 477 - DNA, 406 bp, Lilium asiatic
  Clone ID: LIB3229-011-P1-K1-A5
cccacgcgtccgaacaccggcaaaagcttcatcaaggtacatctatctactctcttgtcccctttatgtcttatttggattgttatgtgtaggattttggaaaagatcggatttgtgtggcaaaatgaggaaaggatcaaagctcaagaaggaaaagagatgttgcaagcttgatgagtatgtgctctcggatctataagtacccctccacccccattggattggaggtaagaggtctcactccggcccgagtgggggagggcacattgttggccgtctttctctcggttttggaggaggcacattgggagagcatctacaagtgatctcggagtggagagttcatcatggttttttgttgtgagtctttgttgagctttaagagagtcatggtaagtgagttttt

SEQ ID NO: 478 - DNA, 314 bp, Lilium asiatic
  Clone ID: LIB3229-011-P1-K1-A7
tcgcccacgcgtccgtgaggacgatgccaatggaggtgctgctggaggagttccgagagaacaatccatgcgagttcacaaaggataggccttccctcataccgaggtcaccacttctacaactaaatcgtgaatgagtttgcccaattttggggcactgatgtctgtcttatgatccattagtgtaatgtaatgtttatctactatcagtgatgagggtctgttgggtgtgagttatatttgaatgttggattcttccaacttattgattgataatataaaaaggtctgtagcgccttgtactttttagagct

SEQ ID NO: 479 - DNA, 368 bp, Lilium asiatic
  Clone ID: LIB3229-011-P1-K1-A8
tcgcagcgccgtcgctctcgccccctcctccctccccagaattctcagccccctcaccggcggcgatggcagtagcggtgactcaggaggttaagctcttcaatcgatggacctttgatgacgttgagatcagtgatatgtcgcttaatgactacattgctgtcaatgtcacaaagcatgctacctacctccctcatactgctgggcgatactctgtcaagaggtttcgcaaagcccaatgcccgattattgagaggctgaccaaatctcttatgatgcatgggcgcaacaatggaaagaaactaatggctgttcgcataatgaaacatgccatggagattatccatctgcttactgatgccaaccca

SEQ ID NO: 480 - DNA, 397 bp, Lilium asiatic
  Clone ID: LIB3229-011-P1-K1-B3
gcaggactccagagaccctggcttccgggccttgggagcaaccagttgtagattgtgcgatggtggatatcctgatcgtgagaattaaaggaagtgccctcaggtgcttgaagatgaggtatttttttcgaatttttccgagatgtgacggcgagagagtgggaggagactgtgttcacggattttaacccattggttatattggtacatcatcgatatcggaggcccggtgaaaatgacagtgtgagggttgaacttgagagggcagtgcatatgttctgggatgctgggctgcctttaccgaggtgtgtggcagtcgatgctgtcgtcaaggttgacataatatcagctctcagggtatcgtctttcccggagatgcttttcaccaaaacgggga

SEQ ID NO: 481 - DNA, 186 bp, Lilium asiatic
  Clone ID: LIB3229-011-P1-K1-B4
cccacgcgtccgctttgatttacttttcgtgttggtctagtatttatattatgtgtgtgggtagttcttgtattctatgttctggagtattatgtttgctgtctggtgatgaacctgtggtttgagttattatgagaagaatttgcagtaatgacaatgaagtgaattgatgatctttcttgtggc

SEQ ID NO: 482 - DNA, 437 bp, Lilium asiatic
  Clone ID: LIB3229-011-P1-K1-B7
ggatcaaatcaaatgggtaagggaaccggcagcttcggtaagcgcaggaacaagacccacaccctctgcgtccgctgtggccgtcgcagcttccacctccagaagagccgctgctcctcttgcgcctatcccgccgctcggatccgcaaatataactggagcgtcaaggcgatccgccggaagacgactggcactggcaggatgcgctacctccgccatgtcccccgtcgcttcaagagcaacttccgtgaaggcactgaagcagctcccaggaagaaggccgccgccgctgcttccttctaaagagtgagaacttggaattttctggctcaatttagctcaattgttatggatcttgttatgagtggttttgattccaggcttatgttgttgaatgttggagtaatgatttgcgaattatgtagacttaaagacta

SEQ ID NO: 483 - DNA, 217 bp, Lilium asiatic
  Clone ID: LIB3229-011-P1-K1-C2
ccgacgcgtgcgctgacacatcggcagccaacgccttagaagacccaggcttacgtacgcttacacgcgaccttatagggatggtattgtgatacatgagctgaatggactgggcgaggtcgtacaacgagatctctggtcaagccctatcacgagcgaaaccattcgtctgggatgacatgacatggtcctcaggatcaatgatcaccaaaaggcc

SEQ ID NO: 484 - DNA, 412 bp, Lilium asiatic
  unsure (1)..(412): unsure at all n locations
  Clone ID: LIB3229-011-P1-K1-C3
gttaagctgcttaaaacatcggttatcagtgttgaatcaagtgaaattgatctttgtgatttccaagatccagaagatggtgttgggaacagagttcctagccagggtgatgaacagccaactgctgatgccggtccaccacctgagaatgaaggtggagagcaagggaatggtggccgtcagaagcagaaaatggttattactgaagaacattttcagaaaattactcaagctctgattatgcgacttagacagaatgaggaggctgtccttcgagatggaagtggtctggctggcatgaaacaacaggatctaataacttggtacatagaccagcagaatgcacaaggtttatacaattcccatgatgaggtgaaggaagaggtcaaatgtatcanggctgttttagaga

SEQ ID NO: 485 - DNA, 403 bp, Lilium asiatic
  Clone ID: LIB3229-011-P1-K1-C5
cccacgcgtccggcggcgccgagatcgagactgtcaggaaatctgctgctggaacaaacaaggctgcttctagcaacacatctctcaatacaagaaagcttgatgaagaaacagagaatcttagtcatgaaagagtgccaactgaactgaagaagaacatcatgcaagctcggcttgataagaaactgacacaggcacagctagcacagctgataaatgagaagccccaaataatccaggagtatgagtctgggaaggcgattcctaatcagcagataatcagtaaactggaaaggggttctgggcaccaagctgcgtgggtaaaaagtagtagtcgggaaagggggtcgagtctacccgaggaatataaaaaaatgcagtatgggggtttaatttggggttt

SEQ ID NO: 486 - DNA, 109 bp, Lilium asiatic
  Clone ID: LIB3229-011-P1-K1-C6
ctttcttgtaagctttggcgattttagattgttatgtactaaaacagtgatgaaccaactctctcaactgtgtcaattattttcctagtctggattcagttcactgatt

SEQ ID NO: 487 - DNA, 337 bp, Lilium asiatic
  Clone ID: LIB3229-011-P1-K1-C7
gcagccctctgaaccagagcacaggcggatccaacgatagcaataaacctggtatcccgaccatgcactggaattgaatgttgacatgtattcgttttgtaattccagaccgcagtcttcgtaagtgtagtagcgctagctgtagctgagccaaaatgcaggtgagttctcatgagttgggacttgtgtcccgcctttgtccggttttggtgagctctgagatgtatttatatttgttgtgcccttttagttatctttgtcattaggttgtggttttaactgtcagtactggagatgttcccttctgttagcatattagttatcatttgaactgttt

SEQ ID NO: 488 - DNA, 353 bp, Lilium asiatic
  Clone ID: LIB3229-011-P1-K1-C8
gcagccctctgaaccagagcactggcttatccaacgatagcaataaacctgatggcccgaccatgcacttgtattgaatgttgacatgtattcgttttgtaattccagaccgcagtcttcgtaagtgtagtagcgctagctgtagctgagccaaaatgcaagtgagttctcatgagttgggacttgtgtcccgcctttgtccggttttggtgagctctgagatgtatttatatttgctgtgcccttttaattatctttgtcattaagttgtgattttaactgtcagtatctggagatatttccttctgataacatattaattatcattttgaactggtttaaaaaaaaaataa

SEQ ID NO: 489 - DNA, 312 bp, Lilium asiatic
  unsure (1)..(312): unsure at all n locations
  Clone ID: LIB3229-011-P1-K1-D1
gcttcggccgccgcagcatctgggagggcggcgttggtctcttcgtcacctccggcgctgtccttttcgctctgactatagtctggctcaaggggtaccgtttccggtcgcagttcaggaagtaccaggcggtgttcgagttctcccaggcctgcggaatctgcgttgggactccggtcaggatacgcggtgtcaccgtcggtagtgtcgtcggtgtcaattcttctctgaagagcatngatgcagttgttgaggtcgaagatgataagattattatacctcggaattcgttagttgaggtgaatcaatctg

SEQ ID NO: 490 - DNA, 356 bp, Lilium asiatic
  unsure (1)..(356): unsure at all n locations
  Clone ID: LIB3229-011-P1-K1-D11
gggttcgtgattccactgaattactgccgagctcgtggtgatagacgacgatggcgaaccctaattcggggacgccggcgaagccctccgacgtctctttcaagcgcaagcgcgggatgttccagaaagaccttcagcacatgatgtatggatttggtgatgatcagaatccacttccagaaactgttgcacttttggaggacattgttgttgaatatgtcactgatttagtgcataaagcccaagatatctcatccaagaggggaaagatcttgactgaagatttcttgtacctaatgcgtaaggatcctncgaaactgcggcggtccacggagctgctatcgatgcacgaggag

SEQ ID NO: 491 - DNA, 62 bp, Lilium asiatic
  Clone ID: LIB3229-011-P1-K1-D12
gtgttcgagattccactgtattactgtcgagctcagagagattgacgacggtggggaaccct

SEQ ID NO: 492 - DNA, 64 bp, Lilium asiatic
  Clone ID: LIB3229-011-P1-K1-D2
ccacgcgtccggctgctcctcgtctaggctctctttttaatcctttcaaccttaacggcggggg

SEQ ID NO: 493 - DNA, 332 bp, Lilium asiatic
  Clone ID: LIB3229-011-P1-K1-D3
aatcggtgccctagcgtccgccctccgccatgaccgcatccacttcttcctcttgcccggcctcatcctgcgactccgatcgtgatcgccgccggcgccgccgtcgccgtgacgagaaggatgctctcaaggtccgcaggagccatagcttgcggtcaaagcggaagcggagtcaccgtgactcctcctcaaccgacagctatactagtggaagctcttctgatagtgagcatgaggtgtccgaccgttcgaggaagcacaaacatgttaagaagtcaaagaagataaaggatcagaaaagcaaaagccatcgccacaaacaccagaaacac

SEQ ID NO: 494 - DNA, 405 bp, Lilium asiatic
  Clone ID: LIB3229-011-P1-K1-D5
cccacgcgtccgttcactagttcatggagctaatggcccattgttggccttgacaccagactcctctggttctctttcttattcttgtatctgtgtgtctcatctcttcctacccttgtcctcttcaaaaccataagaaggtaatggttgctcttattcatctatctgctgtgtctcagctcttcctacccttatcctcttcaaaaccctaagaaggtaacggttggctggaggcctcatgttcccttcggctgcaaatagctgcacgctaatgggtagacaagctcatatgtacaagaatggcaatatctatagtttcgtagtttccacctgggctcatatcagggagcagatcaaaaagaagaaattgatatcaactccttctttaggatctcttccctgata

SEQ ID NO: 495 - DNA, 304 bp, Lilium asiatic
  Clone ID: LIB3229-011-P1-K1-D6
cccacgcgtccgatctatctactctcttgtcccctttatgtcttattaggataggtgatgtgtaggactttggaaaagctcagatttgtgtggcaaaatgaggaaaggatcaaagctcaagaagaaaaagagatgttgcaagcttgatgaggatgtgctctcggatctataagtacccctcctcccccattggattgaaggtaagatgtctcacttcggaccgagtggtggaggtcatattgttggccgtctttctcttggtttttgacgatacacatcttaaaaggtcttcatagagttcttg

SEQ ID NO: 496 - DNA, 299 bp, Lilium asiatic
  Clone ID: LIB3229-011-P1-K1-D7
ctgagagggaaagggacggtcttctccagtttaatatgggatcaagatgtgtgcaagatctacatcctctccaaccttggatttgcagaaccaagcatgctactcattctcgtatttctcctaaatgcctcactgctgaagagggactcgggagtgttaagcaaacggtggaacttaaggaccatatgttatgtcttcctcaactgcatcccgatttttgtcgtgcaaatggctattcggtttgttggtcccagattcaattctgataagagtgatgggggaacgaagatcgccaagta

SEQ ID NO: 497 - DNA, 375 bp, Lilium asiatic
  unsure (1)..(375): unsure at all n locations
  Clone ID: LIB3229-011-P1-K1-D8
ctcttgtagttctctcaccttcgataacgatgtcttcttgctgtggtggagagggtggctgcgggtcttcctgcaagtgtggcantggatgcaatggatgtggtatgtatcctgacttggctgaggggagcactgcctataccactatgatcatggggttcgctcctgctaagggggagtctgaggggtttgagatgtatgctgagaatggtggctgtggctgcaagtgtggtgataactgcaactgcacccccctgcaagtgtggcaagggagctctccatgagaggaagatggaggttttgacccctttggtttacttgtcttctgttggagtgcttaataatgggccatggtttacatgattcaagcttttt

SEQ ID NO: 498 - DNA, 151 bp, Lilium asiatic
  Clone ID: LIB3229-011-P1-K1-E10
gatcatccgctatatccaagctttttctatttatagggtacagagggtttggttatgatgtgcaactcatatcgtggggtcaatatcctatgtgatcaacaatccaactagttagggtggttatagtaggaatattgttactgtttttcat

SEQ ID NO: 499 - DNA, 381 bp, Lilium asiatic
  Clone ID: LIB3229-011-P1-K1-E11
taagaattggagggcactaaacctggatggcgataatccttgggtcaggtgcctgtaatatcttgtgcttcaactacatggcttcttactctttgatatcatcttagattaccggaatatatgggggcgttgaacataagaattggaggactctaaacctgaatgatgattattcctgggttaggttcctccaatatcttatcttcaacaactccacgggttcatactctttgattaacatattagatttccgcaatatatgggttggtgaacataagaattggaggattctaaactagataattatatccttgggtagtttccttcaatatcttatcttcaacaatgagctccgaactcttcctccttaaatctgattta

SEQ ID NO: 500 - DNA, 396 bp, Lilium asiatic
  Clone ID: LIB3229-011-P1-K1-E2
cccacgcgtccgcaacttctgtacctgctggccaaggtcccagcacaagcgatctgtcaggctcaagcagattagtaccaaacgggacgtcacagagacccagggaaagtcaatctgggaagagaaaggagcttgagaggcaagaagatgaggaatcagtgagtgtacatagccggccactggcacgagatgttttccgaattcgtcagattcataaaactcgtggagtgaacagttcgcagacgggttcagcggcatctggagggagtgcattttcaggcgagcaatctgttagcactgaataatagtatttatgctcccaatttaggatacatggggattatttatactggtctctggttatcggatttaggaaacctttttcagtggtattac

SEQ ID NO: 501 - DNA, 396 bp, Lilium asiatic
  Clone ID: LIB3229-011-P1-K1-E5
gttggtacacccaagggccttgtggtgccagttgttcgaaatgctgaacacatgaacttcgctgaaatagagagaacaatcaacactcttgcgaagaaggcagctagcgggacgatctcgatagacgaaatggccggtgggacatttacaatttccaatggtggtgtctatgggagccttttgagcactcctatcatcaatcccccacaatcggccatccttggcatgcattcgattgtccaaagaccgatggtggttgatgggagtattactgcgaggccgatgatgtaccttgcactgacttatgatcacagactgattgatggtagagaggcggtcctgtttctccgtcgtatcaaggatgtggttgaagacccacgcaggctgctcctcgat

SEQ ID NO: 502 - DNA, 293 bp, Lilium asiatic
  Clone ID: LIB3229-011-P1-K1-E7
tgaggagcttgctgcgaattatctcctagatcatatgcacgagtttgaagactgatataagcggaggtaaaacctgaacagtttgatcgaaatctaagcccgactgcaacaatgataacaactttgaaagagggttgggatctgggtactttatgtatgattttatttttcttttctgtgtcattgtgcttctgtttgggagttgatttctggtacatatattatttcgataaaatgtagctggatgttttaacttgtaactatgtatgatcagttaatcgggatcgattcag

SEQ ID NO: 503 - DNA, 222 bp, Lilium asiatic
  Clone ID: LIB3229-011-P1-K1-E8
tgaggagcttgctgcgaattatctcctatatcatatgcacgagtttaaaggctgatataaccggaggggaaacctgaacaacttgatctaaatctaagcccgactgcaacattgataacaactttgtaagagggttgcgatccggatactctatgtatgactttattctttttttatgtttcattgcacttctgtttgggagtttatttttcgtacatttat

SEQ ID NO: 504 - DNA, 164 bp, Lilium asiatic
  Clone ID: LIB3229-011-P1-K1-E9
gatcaaccgtctattagtccaagcttgtcctagtttagtaggtgtagcaaaggagttatggttattatgtgcaactcatatcgtgtgggtcaatatctgtatgtgatcaacaatccaagcttgtttagggtgtagtaaagtaggaattatggttactgttttct

SEQ ID NO: 505 - DNA, 274 bp, Lilium asiatic
  Clone ID: LIB3229-011-P1-K1-F11
cggggcgcctgggtttttccacctttcaacaacttcacaaccacctttacccttcagagaccggcaaaaggttgatcaagggacatctatctactctcttgtcccctttatgtcttatttggattggtatagtgtaggattttggaaaagcttggatttgtgtggcgaaaatggggaaatgttcaaagcccataaaggaaaaaaatttttgcaagcttctttaggagggtctctcggatttttaatacccccccctcccccaccggtttgaagg

SEQ ID NO: 506 - DNA, 427 bp, Lilium asiatic
  Clone ID: LIB3229-011-P1-K1-F12
tgagaagtaccttgccgaatgttgccagtggattgatgaactagagcagatggtgcttctggatagcggcaaaatgtcaaactccggattgtcgtcaatacaagctttacctagcattatggcaaatgttcaccaatattttgttcatgttgctgcgaaggtggagaaccttcatcagtatattgagtcgatgaagaatgcatatcttggtaatcagcggcgtcatggtgacgggaatgacccttttcttgaggctgacaggcgagaaattgccaaacaagaagctgctgcaagaagagttcatccaactttgcatttaccttcagttgcgcaaccatcaactcagggcgctagtttattttctagctcaagggctcctgtttcaagcgttcaacagcaatctttgggcagcttccaatctgctaca

SEQ ID NO: 507 - DNA, 377 bp, Lilium asiatic
  Clone ID: LIB3229-011-P1-K1-F3
ggcgaagaaagctgctgtgaagccgaatcctttatctgctgctgtgaagccgaaggcgaggtctgctgctgcatagccaaaagcaaaggctgctgcccccaagctgtaggctaaatctgttgctgcaaagccaaaagctaaggctgcagcgccgaatccaaatactgccggtcgccctgctaaagcagctaagacctcggctaaagcatctcctgggaagaagcctgcaccggttgctgcaaataagccgtagtcagtgaaaaaaagctcaacggctaagaaagctctcttggccaaaaaagctacgggggtgaagaaaagctaagcctggaaatagaatgcgttcccttttattcaattgactggcaatttatttt

SEQ ID NO: 508 - DNA, 318 bp, Lilium asiatic
  Clone ID: LIB3229-011-P1-K1-F6
gctttcgctcgtaaggataaaaaacttgctaagaatcttacaccaacaaagcgctccataggaaaagcatcatcaatggattgtcctgcaccaacttccttcaagaagcggaagcaatcctccatggatgactataagagctcaggtcggcgaaagaagtgataggtggtgtgttctctagatcgtgggtcagcgaaagaagtgatcggttgcaactttttgatgcttttttgccccagtgaactttaccagtagctctgtcatgtggtttatgttattgttgtgttatcaaaaggcttataccaatcctgcaaaaat

SEQ ID NO: 509 - DNA, 171 bp, Lilium asiatic
  Clone ID: LIB3229-011-P1-K1-G1
aggaccgccacatattgattatgtacatcaaggatccgagccgccttcaagatctcaaaatattataaacattcagtgtatgccacctcaggaccatggtcaacattaggcccgtgggcttgatcaatatgtttggcttcttgataattaatttgagagtagaacattatc

SEQ ID NO: 510 - DNA, 262 bp, Lilium asiatic
  Clone ID: LIB3229-011-P1-K1-G10
gttggatgtatgtagcattgatcaattgtgacattatgaggggtatattgcatgtgcaagataatgcccaatgttatgccaaatattgctgagcttgtattccattggtgacatttttctagaagcgagggaacggtttattacgatgagatcgttgttagaacccgatgttctatagtgagcatgtcatatccaagtgttatacaatgtatgcttcaagaataacaaaaacaccttctgcataatcggtctatgacttctt

SEQ ID NO: 511 - DNA, 344 bp, Lilium asiatic
  Clone ID: LIB3229-011-P1-K1-G2
attttcgtgaagcgtatgcatggttaagacataatactgaggtagatgataaggtggcatcttggtgggactacggttatcaaacgactgcaatggctaaccggactgtcatagttgacaataatacgtggaacaatacccacattgcaactgttggtacagcaatgtcttccccagagaaaccagcctgggaaattttcaactccttagatgtcaaatatgttctcgttgtctttggaggtcttgttggatacccaaacgatgacattaataagttcctgtggatggttcgtattggaggcggttgtttttcgcatattaaggaacctgattatcttaaggat

SEQ ID NO: 512 - DNA, 356 bp, Lilium asiatic
  Clone ID: LIB3229-011-P1-K1-G4
gaactggcgggcaatgctgcgaaggacaacaagaagaaccggataattccgaggcacctgctgctggctgtgaggaacgatgccgagttggggaaattgttgggcggcgtcaccatcgctcatggtggtgtgctgccgaacatcaactctgtgctgctgcccaagaagactgggagtgacaaggagcccaaatcgccatccaaggccaccaagtcgccaaagaaggcatgaagatgagggttttgttgttggatctcgtagcttctgttgaatttgtatctgaactcgttgttgggtgttcttcttggatcgtagttttcaactctcttgttgaatgaaccaattcgtaatttcaa

SEQ ID NO: 513 - DNA, 349 bp, Lilium asiatic
  Clone ID: LIB3229-011-P1-K1-G7
cccacgcgtccggtcgctcttcaccatgtccccccgtcgtcgcatgcgcgtgaccttcacctgcaacgtctgcggccagcgcaccacccgggcgatcaatccacatgcctacactactggaaccgtcttcgttcaggtaataactatgcatatttatctaccaataatcaaatcaatatgagggccggagatcagttaaaaatattgtggaatggaagctcgtacaactagtcaccaagtgataaatgtagaattctatgtcgtatgaaccttatgtttggaatggaaaacttttttttatggtttatgaaccttatctttgagatgttaaacttcttttatgttatga

SEQ ID NO: 514 - DNA, 368 bp, Lilium asiatic
  Clone ID: LIB3229-011-P1-K1-H7
atccggaggtgagagatgccgcggtggctgaggttgcgaggatgtcgacgcggatgctagatctcgacccgcttcctcaccagcaccgaaaggctactgagggagagctgaaactaaggaacagagtcagccgggttgaggggaaatcagcaaccatgtcatctgcagaatctcactgatgtggagctgtatttcttctttactgtgtcctatgttaattgatgctgcaccaactcatttacttgtgtttgccaatgctgtttccttattcagcagtagcatgcagaaattgatttcttgctttgtacattcttattttggttggatgcatatgggtccctttctttgatgcttaaactcaatattta

SEQ ID NO: 515 - DNA, 374 bp, Lilium asiatic
  Clone ID: LIB3229-011-P1-K1-H8
atccggaggtgagagatgccgcggtggctgaggttgcgaggatgccgacgcggatgctagatctcgacccgcttcctcaccagcaccgaaaggctactgagggagagctgaaactaaggaacagagtcagccgggttgaggggaaatcagcaaccatgtcatctagcagaatctcactgatgtggagctgtatttcttctatactgtgtcctatgttaatggaagctgcaccaactcatttacttgtgctcgccaatgctgtttccttattcagcagtagcatgcagaaatcgatttcttgctttgcacattcttatttaggtgcatgcatatggctccctttctttgatgcttaaactcaatattttaggcca

SEQ ID NO: 516 - DNA, 318 bp, Lilium asiatic
  Clone ID: LIB3229-011-P1-K1-H9
cccacgcgtccgagctgctactgcataaatgcatgttgctgctttgacagcttatcttacagggttcccgtaaaggaggatacccccatactcttccttttgaattgtgtatatagaccattggagagggatcgatcgctcctgtcctcccctgttgactctgggggtcccattctcttctttaaatcgtactatcctgccggtatctcattatattggagtattttatagttacaaggtgttcttaatatatgagaaatatgttttcatttatagaaaaaaatagattgattggcttggtgatctgccaagaattcc

SEQ ID NO: 517 - DNA, 280 bp, Lilium asiatic
  Clone ID: LIB3229-012-P1-K1-A1
ctcagcctacattgtaagcgatccatgttgacgatccaaggtctcctacgcgagcaggctactatatagctacttctatatcaatacctagatccaagttactcaccgtcgtgacacaacgacctctctcgaaacaccccttcgtaacctagcttaacagcctcctatcacatgctggtttcatcagctggaggaatatctagaacgcccgtaccaatcgatcattccaataattgcgcactctgaatggccatagagacgctccctaagtccgcacatt

SEQ ID NO: 518 - DNA, 408 bp, Lilium asiatic
  Clone ID: LIB3229-012-P1-K1-A10
aaacccttctggttgatgatgtggactggtacgctaagatagcgctagcagcctctattgacagtgataaacaactgggtgatttctcggattacgagatggatgctgatgattgtttggtcttgaatggtttagacgggaactatggagaggagacggagaagtctttgtgctttgccaagcagttcttgctaggagatgagttggaggaaggggaaatttccggttgatctatttttttgagggtgatgcgagaatagtcgttttgttacgataatttgtgttgcataatcagttgtagtcaaaagtgcacttggggtctcgtggaagatatcttgaaaaagaggaagaaagctttcacagttgtcaacgtcatgtaattgtgttgtcttgcattatgatatcggt

SEQ ID NO: 519 - DNA, 410 bp, Lilium asiatic
  Clone ID: LIB3229-012-P1-K1-A11
ggaatttggtgacggacccgctgaagctgggaccttgcaccgactccgacccttggagctacacgccccaaaagtttctgatgatcaagggcacctacttctgcctccaggccattggagagggcaagctggtgaggctcagcgttatttgtacccctgaagacacacaatgggagatgatccgggattcggagagaacccatctatcaaccaagctagctgacggcactgctgtctgcttggacatcaagcaagacggaacaatagtctctaacccgtgcagaaggcagggcagtgctgatggtgaagggtttgatagccagtggtttcgtgtggtaacaggacctcgaagtgttgatgctacagatagtgggggctcttcagcgggctatgaaagagaccaatagatg

SEQ ID NO: 520 - DNA, 350 bp, Lilium asiatic
  Clone ID: LIB3229-012-P1-K1-A12
cagaaaagaaaacaaagacgaactttggaagtatggctacagctaaagctggaacccctcctccaggagtcaagacttatctcggagctaaagcatgagcaatcggaggatgaactcgcctcaactgtgatcgtatcccgggtttgaactatgcttcttctgaacattacaaggctcgtctagcaaagacatttatgttgggatgcaaggcagatcttattatgtatattaattatgcatgattagcacttgagttattatgtttttgagtcgacagaaattatgtgaatttgcttgttctggtgtgttttggtttttcctttgcgataagatggtgacttggcgtggtc

SEQ ID NO: 521 - DNA, 362 bp, Lilium asiatic
  Clone ID: LIB3229-012-P1-K1-A2
gctgtggttgtatcgccagtggggagtataacttaccttgggaaaagggtgaattatgggaacgaaggtgttggtgttgtgtcccagaagctctattctgcactgaccagtctacagatgggcatcgccgaggacaagatgggctggactgtcaacttagattaggagccctcagcgaacatgtatatgatttctagttttatcgtagctatttatgacttagtttgatcgatgattgctcctcggcttctaaactatttttctctactgaaattctctaaattccactcaaatgtggtattcgagtttattagatgaaactaaattttaatatatgcttacatgtctttgtgtcacaaaaa

SEQ ID NO: 522 - DNA, 421 bp, Lilium asiatic
  Clone ID: LIB3229-012-P1-K1-A5
tcgcggcagttctcctattgtaagatctagaccatggaagccatcggatatgcccggcttttcacacgatgcacctccaaatctaaggacatcaatgcccgaaaggccttcttcagcttgtcggggcagaccgggggcacctagctctagatcatcgtctgttgagcccgagcagaatatcagaccaagacgtcagtcatgctctccttctagaggaaggactccaaatggtattgtgcatagtgggagttctgttccagcagtaagcagattacgagtgaatggtggtgatagtgtgagccctgttcaaattggaagcaacatggtcgagcgggtagtgaatcagagacgactgggacctccgaaacaagatgacctacttttcaaaaccaataacctaaccgggaaatcgtcaccagat

SEQ ID NO: 523 - DNA, 350 bp, Lilium asiatic
  Clone ID: LIB3229-012-P1-K1-A6
cagaaaagaaaacaaatacaaactttggaagtatggctacagctaaagctggaaggggtcctccaggagttaagacttatcttggagctaaagcatgagcaatcggaggatgaacttgcctcaactgagatcgtatcccggatttgaactatacttcttttgaacattacaaggctgcgttagcaaagacatttatgttgggatgcaaggcagatcttattatgtatattaattatgcatgattagcacttgagttattatgtttttggatctacagaaattatgtgaatttgcttgttctgttgtgatatggttattcctttgctatatgatggatacttggcctgggc

SEQ ID NO: 524 - DNA, 295 bp, Lilium asiatic
  Clone ID: LIB3229-012-P1-K1-A7
gagatcggatctcgatcggattcgccatgggcttcgcggggacgagcttgatcttcgtcgtctccggcatcatcgcctccatcttcgttcggctcttctgcaaccgaggcccctccaccaatctggtccatctaactttggttatcacagctacagtttgttgctggttgatgtgggcgattgtatatcttgcacaaatgaagcccgtgatcaatccaatcctcacggactcggagtgattgtaaagctactggcgatgtcatcatatttttaccagaataatatttcgtgagac

SEQ ID NO: 525 - DNA, 93 bp, Lilium asiatic
  Clone ID: LIB3229-012-P1-K1-B10
ccaaacataatacaaaagccaacctgtgagattaagacacatcgcgcgttcgtacgcatgcttcacactattaatatatacaatggaccttaa

SEQ ID NO: 526 - DNA, 192 bp, Lilium asiatic
  Clone ID: LIB3229-012-P1-K1-B11
ggcggttctttacaacatttcctttcggtacccttcccttcgggctcatcaggactgctttttaacccctattccattttcttccactttaggttaattaatgagttaatttactgaaatagtctatgcctttcaaggaggaaggtttttaatgagcaaaaaaaaacttgtggctgaatgacaacattcaaa

SEQ ID NO: 527 - DNA, 426 bp, Lilium asiatic
  Clone ID: LIB3229-012-P1-K1-B2
cccacgcgtccggcgcctgaggtgctgttggggacaagccattactctcttggagtggacatgtggtcagttgggtgtatctttgccgagatggtgagaaggcaagctctgtttcctggtgactccgaattgcagcaattacttcacatattcaggttactggggactccaactgaggatcaatggccaggagtcagcacactgcgtgactggcatgaatacccgcaatggaagccacaaagtttagagcgtgctgttccatcattggatcccaagggtgtcaacctcttatcgaaaatgctgcagtacgatccagctaacagaatatcggcgaaagctgcaatggaacatccctacttcgacagcctcgacaagtcccagttctgatcttgcatcgtcgatcagcttcttttgttcttttgtttc

SEQ ID NO: 528 - DNA, 404 bp, Lilium asiatic
  Clone ID: LIB3229-012-P1-K1-B3
cccacgcgtccgcgctctctgggcaggattcacatgggctatatagtagccgccagggaatgggctatggtggaggttctgcaagtggtggtgatactggtctttactcatcaagctttggcagtagttatctgtcacgtgggtctgatgttggtggtagctcttattcctccttgtattctggccgcaacttaggtggcaatgggtacatgggtggtagtgggtctggttcttactactgagagactgacatcacaagaagaagtccaatgtaggctgtggattatgaagcttctggatttgatgcctacatacttggaaaagaaattgtagtgtgccggttacagtagtctgtttgccaagttcaagtgttgtgttttaaaagattccaagttcggtgtttc

SEQ ID NO: 529 - DNA, 411 bp, Lilium asiatic
  Clone ID: LIB3229-012-P1-K1-B5
aaggcattgaacttggccaaaatctgtgcgttcgcgaggaactcgtgtcaaaatgctctaatacagccggcgaacacacacactttcatctcattagtgggcatcctctgattcgtccagcagaccaaaatgccctggcataaccagcagacatgaaacatcctggtcgcatcaaggggcatagtatcagcgtaccaaaatgccctggcacggccagcgggcatgaacgtcctagttgcatcaggggtcatagtatcgtaagacatttaactcggctggagcccacaggttcgtaaggaacccatatcggaatactccaagcacagctggcgagcatgcacttttagctcatcacctggcatccttctcacttatgggtaaagtgaacccccccacccccttttgcgagcg

SEQ ID NO: 530 - DNA, 323 bp, Lilium asiatic
  Clone ID: LIB3229-012-P1-K1-B6
cgactgccggcggttcttccccaacgtctccacttccggcaaccctcccctccgagcctcatccaggactcctttctaacccctattccatttccttccactttaggttaattaatgagttaatttactgaaattgtctatgcatttgaaggaggaaggtgtggaaggagcaagaaatagctcgaggctgaaggacaacattcaaatgatggctcaaggtgaagggcatcaatagatggtgaagcaagcaaggaaggcaggtatgaagggaagtaatccagatcaagcatcaggatagtcaagcagtggtacatggacaattc

SEQ ID NO: 531 - DNA, 364 bp, Lilium asiatic
  Clone ID: LIB3229-012-P1-K1-B9
tggctcatgcgttttactatgatgggcacaaagcccttcaaattcgggaccaacatggaggacgacagtttcgagtacattgatgacaggcctgacccctttgcttctgctgaccccttggaggatatctgatgcatttgatagctgctatcgaaacctggggtaagttgatactaggcatgttgtgtctatctgtaatgttttgattctttgaaggaggctttgtacgctgaaggtgaagtccaagcacaaataaggtaggcctaattttggattattttatgcatctcttatgaattactttagtttgtctgggagctcgttgtgaagaacataattataacaccaactgttctcacaactg

SEQ ID NO: 532 - DNA, 385 bp, Lilium asiatic
  Clone ID: LIB3229-012-P1-K1-C1
cctccggcatcctctcccccttcgcgttctccaggaggtctctcgagatgatgatgttgtcatagagataaagtattgtggaatttgccacacagaccttcatttcatcaagaacgagtggaatatttctgtttacccaattgtcccagggcatgagattgtcggcattgtcactgaagtggggagcaaagttcataaattcaaagttggagacaaggcaggtgtagggtgcatggttaactcctgccgcacatgtgaaagctgtagtcagaatctcgagaactactgcccgaaggtgatactcacctacagttcagttgacacagatggaacaataacctatggagggtattccaataaggttgttgtgactgaacatttcgtt

SEQ ID NO: 533 - DNA, 217 bp, Lilium asiatic
  Clone ID: LIB3229-012-P1-K1-C10
ggacaaggttgctccattactttgtgctggggtcacagtctacagcccaatgaagtattttggactcaacacgccagggaagcatttgggtgttgtaggccttggcggtctaggacatgttgcagtgaaatttggcaaggcgttcgggatgaaagttacagtgatcagctcatctgctaacaaggagaaagaagcacttgagcatctgaaagcagac

SEQ ID NO: 534 - DNA, 410 bp, Lilium asiatic
  Clone ID: LIB3229-012-P1-K1-C11
cccacgcgtccgcccacgcgtccggggtaacacgttctagaatgccagatttggtgagcacatgaagtctaggattggataaatgtcctaaacaacaatgacaaagctcgatagtagtggtaggagaaatatgagcgatgacgggagaaacataagtaacagaggaaacttgcaagtaatcgagttaatattgagtcccctgcctagatccaacgctaactttcctgcctgttcgcggatcatgcacaacacaagaagtagaagtgaaagttactgtctgtcccatcatgcaaaggcaactgatagagatcaagttcatgcatgcatgtggtgcaataaagactttggataatgtcaatggtccatatgtatcgggggcatgagtaatggtgtcacactgcgtaatcagt

SEQ ID NO: 535 - DNA, 429 bp, Lilium asiatic
  Clone ID: LIB3229-012-P1-K1-C3
gaccacgcgtccgtggccttattgcggcaaacgatggcattttactccgtaatcacattccgcggattctgaaacgacatttcagggaaaagtcctactatgtagatctcttggatttattcaatgaggtggaatttcagactgcttcggggcagatgcttgatttgatcactactcatgaaggagaaaaagatctgtcgaagtataaaatgccagtgtaccggcgcattgttcagtacaaaactgcttactattccttttaccttccggttgcatgtgcattgctgatgtctggtgaaaacttgtccaagtttgttgctgtaaaagatattcttatcgaaatgggaacatactttcaagtacaggatgattacttagactgctttggcgaccctgaagtgatcggaaagattggaactgacatttgag

SEQ ID NO: 536 - DNA, 256 bp, Lilium asiatic
  Clone ID: LIB3229-012-P1-K1-C4
ctcgcgtcaagattcagcagtggatcgagaatgtgaagaaggcgaccgcgcctcattttgaggaagtccatgggaatctttataaagccaaagagatattgaggagtaaagctgccactgcagcaaacctctgagaatgtgttttccttatgaagttgtaataaaatgcgagaaacttgtgtacttttattatgtttggtacttgttcttggattataataaaccaagctcttcagctaagtaatatgttttaatt

SEQ ID NO: 537 - DNA, 378 bp, Lilium asiatic
  Clone ID: LIB3229-012-P1-K1-C5
gcttcaaaaactccctcatcaccttggatgcccttctcaatgctgttcgctgctatatcgactaaagttacagcacaagatatgaaccgggttcactttcactatgaagagttcaagggaaaaaagataaacaggatagagttggttaagagaatgagagacgtcgtcggcgataaactgttggtgtcgacgatcatgaaactacagcacaagctaccgcggcatgaaccttcgactagtcagagggccaggaagtaagagctccaagccaatgcttgaccaggcgaaagcaatcggtgttgtgagctataaccagtttgatgttgagagtttctgaaactagtgagttttttgcatgaaataattgtggctatggga

SEQ ID NO: 538 - DNA, 416 bp, Lilium asiatic
  Clone ID: LIB3229-012-P1-K1-C8
tctcctctctctagatctcagcgatggccggaagggggaaggcgatcggcgctggcgggtcgaagaaggcgacgtcgaggagcagcaaggcggggcttcagttcccggtggggaggatcgctcgattcctcaaggccggcaagtacgccgagcgggtcggcgccggagctccggtgtacctcgccgccgtgctggagtatctcgccgctgaggttcttgagttagctgggaatgctgcaagggacaacaagaagaccaggatcgtcccaaggcacatccagcttgcagtgagaaatgatgaagaactctcgaagctgctggggactgttaccattgccaatggtggagtgatgcccaacatccacaaccttctgctgcccaagaaggctggtggctccaaggctgcggctgctgat

SEQ ID NO: 539 - DNA, 285 bp, Lilium asiatic
  Clone ID: LIB3229-012-P1-K1-C9
cggacgcgtgggtgaatgatgtgttgctttgttgtaggcagatggagattcgatggagtttgaatcggaggatggtgacttatttggaaaatctattgaagaagatgacaatggtctggagtttgctatcgttgggcttagcgctgagttcatcttggaggactgatgctgtaggggaggctcgaatttgacattctctgcattatctgcacttgttcttttagagcctgacttgttcttggagaaccagaacaatgtgtaatgagtaattgatatattgaacca

SEQ ID NO: 540 - DNA, 243 bp, Lilium asiatic
  Clone ID: LIB3229-012-P1-K1-D11
gttggatgtgtattaccattgttaaagccaaagaaactggttgacacaacatatcatccaacttttttataaacccttatggtaaggataatgatgccgaattgttgagctagggcatccacttcatgtgacaaagttgttataatttggaatgcatgtgtatgaaaataaatttttattttgtattctgtatatactaaaataaaataaaaaatatgggcgtgcgctttataggatccatgc

SEQ ID NO: 541 - DNA, 412 bp, Lilium asiatic
  Clone ID: LIB3229-012-P1-K1-D2
tcttcttgctgtggtggaaagtgtggctgcgggtcttcctgcaagtgtggcagtggatgcaatggatgtggtatgtatcctgacttggctgaggggagcactgcctctaccactatgatcatggggtttgctcctgccaagggggagtttgaggggtttgagatgtatgctgagaatggtggctgtggctgcaagtgtggtgataactgcaactgcaacccctgcaagtgtggcaagtgatctctccatggagaagaggatgtagggtttgataccctttgtttacttgtttctgctgtagtgctgaataatggccatgggtttatatgatgcaagtctttttgcaccatgagtggttgttcaccagtggcttaatgtcttgtggtggtgctgtgttggctttgtatgtctg

SEQ ID NO: 542 - DNA, 427 bp, Lilium asiatic
  Clone ID: LIB3229-012-P1-K1-D5
tcggcgaggcaatccaaagatccgacgacatcacagtcgatagtacagtttccggtgaaccgccagtcaggttttccatgcatagtgatgcggacagaaagactgaggacagctccacttcccatctatcgttcaaacgtaaatttccaacattttccaaccgggcctccttcggaggcaagcaccttcctcgtaagccaccgtccgttgccttgtggaatttgaccgaaaacggagaaaagatgtctaatgcacgaaagctcacggaaacttttcaaaaggagctcgtgatgacgtccaaccaagcgtcgatgcagaatcaacgacttcctaaagggttcgcctatgttcctgtgagtcgtctgtcgaaagacaatggggattcttgtgacccggttgaacctggtggttagaatgaaagggagaa

SEQ ID NO: 543 - DNA, 304 bp, Lilium asiatic
  Clone ID: LIB3229-012-P1-K1-D7
cggacgcgtgggagcggcctcatctacgaggagacccgcggggtgctgaagatctttctggagaacgtcatccgtgatgcagtgacctacactgagcacgcccgccgcaagacggtgactgcgatggatgtggtgtatgcgctcaagaggcaggggcgaactctgtatggcttcggcggctgaaggtcgaggtggctttagtagatgttagtgtcagtagtagttttagatggacttgggctcagtttcttgtaatttgtcagatttcttgtctgatatggaaatttaaaaagtttgtttgagt

SEQ ID NO: 544 - DNA, 423 bp, Lilium asiatic
  Clone ID: LIB3229-012-P1-K1-E2
cggaaccccggggcgacccacgcgtgcgcgtgtgcccacagtcaaccacaccggccaaacaaacgccgctacaaaacggcaggccgatagcaccagatccaaagcagctgtcaaattgaatccagagcaaaaaaatgtgttgcgaaggcgactgccggccgctggggtggctgctgggcctccccttcgccttcctcgccctcatcgtctccatcgtcggcgttattatctggatcgtcggattgttgctgtcgtgcatctgcccgtgttgtttatgtgtgacgatcgtggtggagctggcgatcgagctcatcaaggcgccgatacacgtcatggagtggttcaccaaacagattccgtgctagagctagtaatttcctttcttctctcattcaactttaggcagcgggcgtatgttttctt

SEQ ID NO: 545 - DNA, 371 bp, Lilium asiatic
  Clone ID: LIB3229-012-P1-K1-E3
attttcttgtttccttgctgaagaagaattggcaaaatgtgaggtgcctgtacctgaagagcaccatggggaagcctgtccgagtgttctaagcagagttcctttcttatagttctttgaagaggtttaagttgtaggaaatacctgtctgttttgtctgcaaggcttgatttcaaagtgttgtttattgagctgttggttctgtttgactctcatctagttttcaattattacccagacttttgccgattaaataaaaataataaaataataaaaaaaatatatatataaatttattattaaattacgggggggccctttttaggatccaaaattatttatcccgtgcgtgctacggattatattttttt

SEQ ID NO: 546 - DNA, 294 bp, Lilium asiatic
  Clone ID: LIB3229-012-P1-K1-E6
gcaaaaaataaaaagacttgatttcaatattattttaagcacatagttcttgctttgttgtgctagggggaatacagagattttcaagaggaatgcaggctacaccagaatcatcataacttttcccatacggggtgacaatgcaccgatggcttacattgagctggtctgatcattgtgtagtttatgagatctcctttaggtgagatgagggttgttttgtgtgcatacttttaaaaaggatccttaattaaattatgtattgcaggttttggatgataacttaaaatctgt

SEQ ID NO: 547 - DNA, 185 bp, Lilium asiatic
  Clone ID: LIB3229-012-P1-K1-E8
caatttatagaaaggaatatcatacataggttcggagttcctgcctatattattactgataggggacctcaattcatcggaaaatccttaaatgctttagcagacaaatatggattcgagatgatacactcatccagtagatacgcacagggcaacggacaagcagaaagatccaataaaactat

SEQ ID NO: 548 - DNA, 240 bp, Lilium asiatic
  Clone ID: LIB3229-012-P1-K1-E9
ttttggttccctgctgaaggaatatttggcaaaatgtgaggtgcctgtacctggaaagcaccatggggaagcctgtccgagtgttctaagcaaagttcctttcttatagttctttgaagaggtttaagttgtaggaaatacctgtctgttttgtttgcaaggtttgatttcaaagttttgtttattgagctgctggttttgtttaactctcatctaagtttaaattattacccaaacttt

SEQ ID NO: 549 - DNA, 417 bp, Lilium asiatic
  Clone ID: LIB3229-012-P1-K1-F2
cccacgcgtccgggccaagacagatgagcttgtttttgttttagcagcaaccaatctaccttgggagttggatgcagctatgctccgtcgtcttgaaaagaggatacttgtgcctctgccagaaccagaagcaagacttgcaatgttcgaggcacttctgccttcagttcccgagactgcagagattccatatgagttccttgtggaggggactgaaggctattcaggttcagatatccgtctagtgtgtaaagaggcagccatgcagccagtgagacggttaatgacaattttggaaggcaatcaggagcgagtgcccgatgatgagttgccagctgtcggtccagtgacacctgcagatatcgaggtggcgttgaagaacaccagaccatcagcttatcttcatgcccaccgtta

SEQ ID NO: 550 - DNA, 417 bp, Lilium asiatic
  Clone ID: LIB3229-012-P1-K1-F3
atcaagctgacggacctgggctcagatcttggatctaggcaacgtccccagtacacggtgcctccgaaagtgtggttcggttttttccccaagtttgatgttgaatcgtatgagttcgatggtagctctcttgtcaaagcttcgaatagggaccccgaaaagcattactctcttgttggtattacctgtgctccggcattccagtttgaggactctgaaccaggacagtttgctgagctgagttctttggctccgaatgctcaggcttttattgattacctccttccgagcaattcttcaagcttaaaggactgacaacggaggttaaattgacataggtaactgatttccatgtaagactttttttacttgcgtcatgttggatcatatgttaaattgactgcacatctttaagtt

SEQ ID NO: 551 - DNA, 348 bp, Lilium asiatic
  Clone ID: LIB3229-012-P1-K1-F4
gcggccgcccacgcgtccgaaagagttaccaaaggatcctgaactagtgaggaaaatcggggaagcaactgctcttgaagttaaagcaactgtcatcccttatgcttttgctccatctattacggtttgtagagatccaagatgggagcaggaaatgacgcagataatccctggcttacaaggaaaaactactggaaaaggagttacttttgttgcatgaaagtatggcacattccatttcagaattactataataagttgacacaatgctcccagagaaattattatgaactgttagaaatatatatgtcagtaaagatcagtctgagattcggtatgcatgaagtt

SEQ ID NO: 552 - DNA, 204 bp, Lilium asiatic
  Clone ID: LIB3229-012-P1-K1-G11
gcttcatcaaggtacttttatctactttcttgtcccctctatggctgatttggagggttttgtgtaggatcatggaaattcttggatttgcgtggtaaattgagtaatggatcaatgctcacgaaggataattagttcatgcaagcttgatgtggatgtgctctcagatctatatatacctccttgttaatcgcattgtatttg

SEQ ID NO: 553 - DNA, 401 bp, Lilium asiatic
  Clone ID: LIB3229-012-P1-K1-G12
ccaccttccaacaactccacaaccaccttcaccctccaacaccggcaaaagcttcatcaaggtacatctatctactctcttgtcccctttatgtcttatttggattgttatgtgtaggattttggaaaagcttggatttgtgtggcaaaatgaggaaaggatcaaagctcaagaaggaaaagagatgttgcaagcttgatgaggatgtgctctcggatctataagtacccctcctcccccattggattgaggtaagaggtctcactccggcccgagtgggggagggcacattattggccgtctttctctcggttttggaggaagcacatcttgagaggtcttcaaagagttcttgagagtccgggatggttattctttgtcatggtacttggtggagtcat

SEQ ID NO: 554 - DNA, 217 bp, Lilium asiatic
  Clone ID: LIB3229-012-P1-K1-G2
gagttgaagaacaggaaagggtatatgctgcagtatcccaacacatcggataacactgggattggagggctcactgggaaggggatccccaacagcatttctatttgagagacagtgaagtacggctttttcaaaatgcttaaaataaatacaaggtcatgtgatccttgtcttgtgttgctacgtgagtttatattaatatccttctctttgtaaa

SEQ ID NO: 555 - DNA, 193 bp, Lilium asiatic
  Clone ID: LIB3229-012-P1-K1-G3
cccacgcgtccgcccacgcgtccggtttcttttataatgctttttttaggtaactgaaagtatttccttggctatcttgcctttgactgcttttgatggtgaacaccttacctgttatgtttaactactttatggctacattagtagtctttttggttatctgcatgatgaactagttggttttaatggatta

SEQ ID NO: 556 - DNA, 366 bp, Lilium asiatic
  Clone ID: LIB3229-012-P1-K1-G6
gcgcaccgatgagtaccgggagacgatgagggagttcgtcaagaggctgggagagctagcggaccaggtgctcgacctgctgtgtgagaacctggggttggagaaagggtatttgaagaaggcctttagtgggacgaaggggctgaccttcggtaccaaggttagcaactatccgccctcaccgaagccggatctgattaagggccttcgtgcacacaccgatgctggcggtcttattcttctgtttcaggacgacaaggtgagcggacttcagctgctcaaggacggtgagtgggtggacgttcctcctatgcattactccattgtcattaacctcggtgatcagctttgagggcattacaaatt

SEQ ID NO: 557 - DNA, 376 bp, Lilium asiatic
  Clone ID: LIB3229-012-P1-K1-H1
ggtgaatcagcgttgaatgttcttgctataaccgctagccttcactttccttatgatcatcgtatgctcgtccaaaatctgactactcaggagtatttcaaggcttcagtgcctttatctgctcaggcttcgttcgcttatgcttttgctgtcagcaaatacttgcagcctggcacctttgatttagtaggtaccatagtttatgaaattgatcaacaaccctatcagagtgtcttttacaatggtaccattgaagttgttgaggttggagggcttttcagcattgaaactgttttccttgttacccttggagttgccctctttgtccttctaatattattgggaaacagtcagctgcagaactactcaaagaaaa

SEQ ID NO: 558 - DNA, 390 bp, Lilium asiatic
  Clone ID: LIB3229-012-P1-K1-H12
ccacgcgtccgcaaaaagcacagatgccaccactgaactgcagagcccactaaaagaggaggtggtagaaaaagtccatgagcagcaacatatctgtgatgaagagggaccacccattggttgcccatgcattgtgatctctccggcacccaattcattgaaagaggacgatgatgatgacttctttgatgagcttgaggagctacccatttcgacatcttggactggattggtgagaagcagcttctttgatgaaagggttcttctcccctcttagattgtatgcactagaggttataaattaagaagatcattgtgtgtataccctaatggttgtaaattaagagagcattgtgtgcatattagattgtatgcaccagagattattaa

SEQ ID NO: 559 - DNA, 344 bp, Lilium asiatic
  unsure (1)..(344): unsure at all n locations
  Clone ID: LIB3229-012-P1-K1-H6
cccacacgnacggcacgcgttcgcaaaaagcacaaatgccaccactgaactgcagagcccaccaagggaggagtgtttagaaaaagaccacgaccaccaacatatctgcgatgaacagggaccacccattggttgcccatgcatagtgatctctccggcacccaaatcattgaaagaggacgaagatgatgacttctttgatgagcttgaggagctacccaattcgacaacttggactggaatggtgagaaccagatactttgaagaaagggggcctctacccctcttagaatgtatgcccccgaggggataaaatacgaagaacactgtgtggataccctaaa

SEQ ID NO: 560 - DNA, 411 bp, Lilium asiatic
  Clone ID: LIB3229-012-P1-K1-H9
gattaccgcacatccttgacaacaaggggctcttgctggtcgaccaccagctcgcctatgataagcgcactcgcccatatgtgctgaaaatggcgaagagccaggagtacttcttcaaggagttcagcaggggcattaagattctcactgagaataaccccttgaccggtgacaagggagagatcaggctgcagtgcaacgtggctaacaagaggcactagatagtgttggtgctgaaaggagtgtgtgtggtggcccttctatggatggggacggtgctgtggatgttgttgctgccgcttttcctttgtttttgctttggagttatcggtgcctaactaggattgtgggtgatgaagatgtattatctattaaaggaggatggttgttggtggtgtttttctttaaaaa

SEQ ID NO: 561 - DNA, 108 bp, Lilium asiatic
  unsure (1)..(108): unsure at all n locations
  Clone ID: LIB3229-013-P1-K1-A10
gcnanccgcgggcggccgcnccgggggagccaggcgngcggccgccggcggggggcgccacngctctgcnagaggcncaccaaaagccaaggcacgggacaacgcccc

SEQ ID NO: 562 - DNA, 71 bp, Lilium asiatic
  unsure (1)..(71): unsure at all n locations
  Clone ID: LIB3229-013-P1-K1-A11
nagagganccaagcnnacgnacgcgngcgggcgacgncanagcncnncnanagagncaccnaaanncaann

SEQ ID NO: 563 - DNA, 398 bp, Lilium asiatic
  Clone ID: LIB3229-013-P1-K1-A2
ggatagaatatacatgacatgaaaagagaatatacatgtgaagtggtatatacacatgaatatatacaagtgtggggagtttccactaggtagagagtgctcacgtgtcgtacccacctcatggaggcgatgtagtcggagtcacgagtgacaacctacatcaactctttaatacttttatggtgtcttgggttgtcattgatactatttttggattttcttataatatggtttgatggtgaatgtggaatgaagggtctgtggtggtgttatttgattattgaatgatcatgtgatagatggctatatgtatattatagagttatgatggtaggagggagaaatgactagaatagtggataatctttgtatctttttggtttatataaactacctag

SEQ ID NO: 564 - DNA, 267 bp, Lilium asiatic
  unsure (1)..(267): unsure at all n locations
  Clone ID: LIB3229-013-P1-K1-A3
gttcttagttgnatgaccaacaaagtgtgcccgcttatgaagcccatggagaggaatgtgggcacaaacatgaaacgactgtactggtatggctttttactttttcatgtactgaatggccgtttgtgatttttttacttctaaatgatcattggatgtgtatttgacccctactatttgtattgattgaacaaaaagcactcatatacctatattgtattgattgaacaatcatggattagtataatcatattgtattgattgaaa

SEQ ID NO: 565 - DNA, 174 bp, Lilium asiatic
  Clone ID: LIB3229-013-P1-K1-A4
ctcaaatgctgctagaagggatatatctaccctccatgaagaatatatatagacatggtacgtacatgatttgctctgattatgaatctatgtaatgctgcagaaagttggttgctgtacaaaatacttgttattaagcctaaacatgtcataatcatggactggtgcttgtgt

SEQ ID NO: 566 - DNA, 321 bp, Lilium asiatic
  Clone ID: LIB3229-013-P1-K1-A6
ctttgtcttagtcataatactactcgagttgtttactgatgagaaggctttaggtttggggcgggcatgatataaaaaggggattatgctcgactgggtaaaaaaactgcatatgtagaacaagttgcgttcaatggtcgacaaagacctgaagaacaactatgacaggatggagttagaagagataagtgaaggggcttttgtgtgcacgcagattaacccctgataccgtgcgaagattacagaagttacatggatgttggaaggcaataggctcaccgagaagtgggaagtgtatcaaaaaaatgagactcataaatt

SEQ ID NO: 567 - DNA, 362 bp, Lilium asiatic
  Clone ID: LIB3229-013-P1-K1-A7
caatctcaaaatccaaatcccccatcccctttgcactaatggcgccgaaatgcgagaagaagcccgcggagaagaagccggtggcggagaagcccgccgccgaggaggagaagaagtcagccccgggaccggcggagaagaagccggccgagaagaagcccaaggctggcaagaagctcccggcctccaaggaaggggcctccgacaagaagaagaagaggtcgaagaggtcggtggagacctacaagatctacatcttcaaagtgttgaagcaggtccaccctgacatcggaatctccagcaaggccatggggatcatgaacagcttcatcaacgacctcttcgagaagatggcacaggag

SEQ ID NO: 568 - DNA, 175 bp, Lilium asiatic
  Clone ID: LIB3229-013-P1-K1-A8
gtatgtaagtaggtatatatatagttagagagtatagaagtgcatcctgttggtctgtctactgagttccatagagctctggatgtgtataggccggagaaaactcccctgttagctttagcttcagagtgtgtgttgaagggtgacctcatcgccctagtacttgttctacttt

SEQ ID NO: 569 - DNA, 417 bp, Lilium asiatic
  Clone ID: LIB3229-013-P1-K1-B11
gttctgccttctccgaaggagaggcctacgatgtttgaagtttaccaactgcttagagccattggcgagaaatatcattttagtactgatgatgatatattattgccaactgctagtacagaggctgactaccctgatgaacttattgtggcacggtaaccgagcgtattggcttagttatacgaataagaaattagatgtgtcggaaggagtaagcgcacacctgccagaatcatctcagtgacctatgcagtcttgaatatcaggaagaaatccgtcggtacctcacttatattaggtgatatgtgatttttttcctttatgcattatcataggtaatggctaagtgtttttgtgttcttccttgtttggatgttcacttgtatatgtcaaccttactattcctagatttagtag

SEQ ID NO: 570 - DNA, 384 bp, Lilium asiatic
  Clone ID: LIB3229-013-P1-K1-B2
aggccccttcatacctcacctacttgaggagcatctctaaaccttctcggctgaagtgttcaaatggcttctgggcttctgcaatggctgcctacaaggtgaagcttgttgggccagaaggggaggaacatgagttcgaggccccagatgacacatacattctggacgcatctgaacttgcatggttggagctgccatactcttgcagagctggggcttgctcaacctgtgctggtcacatggtgtcaggtgctgttgatcagtcggacggatcattcctcgacgagggacagatggaaaagggttatgttctgacttgtgttgcctatccaactgctgattgtgtcattcacactcacaaggaaggtgacctgtattaatgac

SEQ ID NO: 571 - DNA, 419 bp, Lilium asiatic
  Clone ID: LIB3229-013-P1-K1-B5
gggaggagatggtggtggagaatgagctgatggcgacgaaattgaatgaagtggcgacttggtggttagctgatattgcgttaaatgtggagattgagcatcttgatagcatgaacaagagcaaggagcatgggtttgttggatttcggaatacgaggacgtccttcatttcttgagttgataagatgaaggcttataaggttgtcccttcatgaaggatttgctctcttgctttctgccttgaagattatgaatcgggccatctggtaatgctttcacaattgattatttttaaatgaattcctacctcttgcttgtgcttttgggtcttctatgctttgtttcagtcatgaaaaatgttggtgtgaatcggggaaaaatctgtatgattgtggtcaactattttgtatgctaccttg

SEQ ID NO: 572 - DNA, 276 bp, Lilium asiatic
  Clone ID: LIB3229-013-P1-K1-B6
gcaaaacgttaggtgcttgtatctgaagagctctatggggaagccaactcgcatcttttgagctgtcctagtaggattacttggtttgcagcaacattttgtgggagaacttacttttgtttttaattattatttgctggaatctcaacttcaattattctatttgtagctgtgtctggattcctggcttggattaagtcttttgttggtttgtgcttattttgagaatttgctttatggccaaatgtttgattagagttctgttacatgtctaaa

SEQ ID NO: 573 - DNA, 405 bp, Lilium asiatic
  Clone ID: LIB3229-013-P1-K1-B7
attgcagctggcacaaacaatcatcaggtccgattatatgatatttctgcccaaagacgtcctgttatatcaatcagtttccgagagtctccaatcaaggctgttactgccgatccagatggctatacagtttacattgggaccgggtatggagacattgcctcctttgacatgcgaacaggaaaattgctggggtgctttctgggtaagtgttctggaagtgtcagatccattgctaggcatccagaactacctctgatagcctcgtgtggactggacagatatgtgcgattctgggatacaaaaacaagacaacttctttcggcggtcttcctcaagcagcatctcactaatgtaatgattgattcacatttctccgccgaagaagtttcagtaacttgtgat

SEQ ID NO: 574 - DNA, 274 bp, Lilium asiatic
  Clone ID: LIB3229-013-P1-K1-B8
gtcgaaaatggccagtgaaccactagcatgaatgtaaggtattgggagtcaagatcgcacctcggattcaccttgccttgcggtgtgtgattgtaggggatgttgcgagcactccaccatgcaagggtgttggttcgggcattgactttcgcttattaggagttctgaagaatacaaaatctgataggtctagatttcttgtgttcgtgtagatgttatggactaatggacataactggagtactgaagcattcatacatctgcggactataaa

SEQ ID NO: 575 - DNA, 344 bp, Lilium asiatic
  Clone ID: LIB3229-013-P1-K1-B9
acgatgactctgaccggttcaaggtcatgttggcaaggatcaagagaggtggtgctatcaggcaagagcttgcgaaactgaagaagcagccagtcactgcttaactatctcagtgccctgcgggataagagcttctgaggagtcaaccatattatgtactgcataggactgctggggttagaagttaaaactccggtgcctaccatagctgaggccaggatatgacgagtgagatattctatatctgcattgctaagatggacatatggagctctaagaattagacatggatgttagagggtccagttcgagtcttccaagacaaccagaaagaagaagagcgg

SEQ ID NO: 576 - DNA, 419 bp, Lilium asiatic
  Clone ID: LIB3229-013-P1-K1-C1
gaaagtttcttcaacttctttaacccaccacaagtccctgatgatgatgatgatattgatgaagaaactgctgaagaactacagactcaaatggagcaagattatgacattgggtccactattcgagacaagatcatccctcatgcagtttcatggttcactggagaggctgctcaagatgatgatttagaggacctggaaatggatggacttgaagatgatgatgacgaggaagatgatgaggaagacgaggaggatgatgatgaggaggatgacgatgaggatgacgaggaggatgaagaggagggtagcaagtccaagaagacaaccagaaagaagaagagcggcgctgatggtcagcaggtggatcgaccggccgagtgcaagcaacaatagtgatatctttgtgtggatgtcat

SEQ ID NO: 577 - DNA, 419 bp, Lilium asiatic
  Clone ID: LIB3229-013-P1-K1-C10
cccacgcgtccgcccacgcgtccggcagaagatggtgagaactggagtgtggggcagagacaactagtttgcctggctagagtgttgctaaagaggaggagaatacttgtgttggatgaggctactgcttctgtggacacagcaaccgataatttcattcagacaacgatcagagaagagaccagtaactgcacggtcatcacggtggcacacagaatccccactgtcatcgaaagtgacttggttctagtacttgatgaagggaaaatattggagttcaattctccttcttatcttttgagagaaaaatcgtcagctttctcaaagttggtaatggagttcttagggaggtctaagactaaacaggagtcagaattgaactgaaatgagccatagggataaatcgccatcttctaaca

SEQ ID NO: 578 - DNA, 419 bp, Lilium asiatic
  Clone ID: LIB3229-013-P1-K1-C12
cccacgcgtccgcccacgcgtccgcccacgcgtcccccacgcgtccgcgctattttcctatgtgtcaagtagcttcgcaaagttcgtcgatggagttcttcggcttcatgatgtcgtcaaagccggtcgaagctcagttcgtgtcgtcggtgatgactagcatgatgggcccagaactggcagcagggtttgggaccaccgaggagcggctaagggggttagtgggcttgcagaagtatcaatttattctaccgccttcagcggggagaaaggagggggaagaggtgtaggtttgatgctgttacatggaagttgactcagttttcggattggagtatttgctttcaaatctcatgttgtttactttagtagcttatgtacttaattttgtttaatctcacattaagtaggatgatgag

SEQ ID NO: 579 - DNA, 401 bp, Lilium asiatic
  Clone ID: LIB3229-013-P1-K1-C2
gaaaggcgctgcaacttatttaacccaccacaagtccctgatgaagacgatgggatgggtgaagaaactgctgaagaactacagactcaaatggagcaagattatgacattgggtccactattagagacaagatcatgcctaatgcagtttcatggttcactggagaggctgctcaagatgatgatttagaggacctggaaatggatggacttgaagatgatgatgacgaggaagatgatgaggaagactaggaggatgatgatgaggaggatgacgatgaggatgacgaggaggatgaataggagggtagcaagtccaagaagacaaccagaaagaagaagagcggcgctgatggtcagcatgtggatcgaccggtcgagtgcaagcaacaatagtgata

SEQ ID NO: 580 - DNA, 360 bp, Lilium asiatic
  Clone ID: LIB3229-013-P1-K1-C4
cgtgttcattgtcggatgttgagcgatttaaatctggcgagctgccattggttgccccttcgaaagattacacaaatacgttagtaagaggactggtggagggaaatcagctcagtgatactgaagccattgactacattaatcgtaatgctgctaagaagttgtgatttcattatgttgttggcttgcttgttcttagagaaagcagtatgtctttatagtaacgcaggagatttatgggcaattcttcttgttcagtttcacttgagcaagcagtatagctttatatagaatacctttgatttatgggttgcttatcctgtgcacagcttcagtttatttaaggcaggatttctcaaa

SEQ ID NO: 581 - DNA, 422 bp, Lilium asiatic
  Clone ID: LIB3229-013-P1-K1-C5
agacatgattataaaagctcaaataatctctaagggcctaaaagttattctattgaacataaccttctactatttttctttattctcaatctgggtggctaacaaaattgacaaaatgttgaggaactttcttttggtaaggcataagattcttctggtgggaagatcccacaaattggattggatggttttttgtatcacaagggaagaggggaatatgtatcaaaagaattagcgagattcgacatacataagacactccttggtaagtggtttggaagttcgacggggaacaacctagacttcaaaaatcagttatgacattcaagtatggaacagactttgaaatgtcatctccattgacggagctttgatctggcaccatgttctgggatatttgagtctgaaatgtgtagttgctg

SEQ ID NO: 582 - DNA, 153 bp, Lilium asiatic
  unsure (1)..(153): unsure at all n locations
  Clone ID: LIB3229-013-P1-K1-C6
gcagngatccattctaaccaagggactgcatatcttgtatctgtagaggcattaaattgctggcccatcattgatagtttattaccacagttggcagtaaggattctctgttcactatactttgttagaccttaaaggacataattctctctt

SEQ ID NO: 583 - DNA, 377 bp, Lilium asiatic
  Clone ID: LIB3229-013-P1-K1-C7
acggatttcaccccattctgatgcatgtggccttacattgctcctccaagttaatgatgttcaaggtttacaaataacaaaggatgggaaatgggttccggttgaacctatggtcgatgcttttgacgtgaacattgcgtatgctcttgagatattgagcaacggaaaatatacaaacatcgatcatagggtaatgataaataccgagagagagcgtgtctatgtcgctgcatttcatggaccagacgaaggatatatgattggtcctgttgcacaactcgttagaggaggtggatgagaattacaagaatatagtctatgcagagtacgtgaagacatacttatgtgcaaagctgtatgggaagagagtctcagac

SEQ ID NO: 584 - DNA, 228 bp, Lilium asiatic
  Clone ID: LIB3229-013-P1-K1-C9
cccacgcgtccggttttaaaaaaaaaaaaaaaaaaaaaaaaaaaaaaagaaagggaaaaaaaaaaaagataaaaaaaaaaaaaaaaaaaaaaaaaaaaaaaaaaaaaaaaaaaaaaaaaaaaaaaaaaaaaaaaaaaaaagggggggccgttctagaggatccaagtttacgtccgcgtgcatgcaacgtaatagtttttttataggggcacctaaattaaattaacg

SEQ ID NO: 585 - DNA, 120 bp, Lilium asiatic
  unsure (1)..(120): unsure at all n locations
  Clone ID: LIB3229-013-P1-K1-D1
gacccagcgnccgaagcangggnngancagagcncggaggcccgaagangagggcgaagnggaagaagaagcggangaggaggctcaagaggaagcgccgaaagangaggcagcgancaa

SEQ ID NO: 586 - DNA, 415 bp, Lilium asiatic
  Clone ID: LIB3229-013-P1-K1-D10
cggacgcgtgggtgcgaatgttctatcttccatgaacctgattgagaagacacatcaagcagagactaggaagccagcattccgctggctgggctttaatggaaagaatgacaagagcatcaatgttgcaagatcgcacgacaggggagttatcgtcgcattacctccgaatgcaacacagtcgaataagagggcatttgctactgatatcaccaatttggattctaagaggcccaagttgtgctccatggtggataaagagtccaccaacgatgttatgaaggagtgcagtgcaactgcacagaagcaacatcaggcatccaaggactatgtttttgggcctttctgtccgtctgaagtgataaaagaagatgtaaatactgaggaaatgagtcaggattgggagacattggcg

SEQ ID NO: 587 - DNA, 370 bp, Lilium asiatic
  Clone ID: LIB3229-013-P1-K1-D11
gtcatcatcatgagcatgggcttttctgtgccggaggcgttggttggcttctcgagacggaaagttagtctgtgaaaacacccttgatgcgaggctcgatgttgtcttccggaagaaactgccagagatcaggaaaaggcttttcggtctggttgtcgcttgatcagttggcatcatcatgtattatgtttgttgttaataatttcagattttaagcaatggctcgtgttgggtcgaattttaagcaatggctcgtgttgggtcgaattttatgtacaatcattgtttgtattcttatgactcgttaatttgtccaaattggttatgaagacatttgggaataaattattttctgagtttactgagaaaa

SEQ ID NO: 588 - DNA, 170 bp, Lilium asiatic
  unsure (1)..(170): unsure at all n locations
  Clone ID: LIB3229-013-P1-K1-D2
gaatcccggggcgacccagcgnncgaagcangggnngaacaaagcncggaggcccgaagacgagggcgaagcgggaggagaagcggaagaggaggcgcaagacgaaacgccgaaagacgaggcagcgancaaaggaagcggccngaagagaagaaggcagccgacaacaa

SEQ ID NO: 589 - DNA, 307 bp, Lilium asiatic
  Clone ID: LIB3229-013-P1-K1-D3
ggactgggggccggtgtttgtggcggtggtcctcttcgtgctgctgacgccgggcctgatcgtgcagatccccggccggagccgcgtggtcgagttcggcaccttccacaccagcggcgcgtccgtcgtcgtccactccatcatcttcttcgccctcgtcacgatcttcttcctcgccgtccgcgttcatgtcgtcatcggctcctaaccctagttgagttctcatgtcttttcattttaattaattgaattgtatgtactagatcttgttgttacgacaggtaatgcgatgattattggtttaaaa

SEQ ID NO: 590 - DNA, 280 bp, Lilium asiatic
  unsure (1)..(280): unsure at all n locations
  Clone ID: LIB3229-013-P1-K1-D6
aagaggacccaagcnaacgaccccggccaggcgaggcaaaagcccnccaaaagggcaaccaaaancaaancaacgggccgcggnnnaccaccgccgggacgggaaaaccccggccgnacccaaacnaaaccgccnggcagaaaaccccccnnccgccagcggccgaaaaaccgaaaaggcccgaacggacggcccnnccaaccagnggcccagccggaagggcaaagggaacccccccggaaccggcccanaaaccgcgggggggggggggggacccccc

SEQ ID NO: 591 - DNA, 310 bp, Lilium asiatic
  Clone ID: LIB3229-013-P1-K1-D8
gtactgtgggccgatgtttgtggggttgctcctttatggtgctgcttacgccagcgctgatcgtgcttattcctcaccggaaccgcctgatgaagttggacaccttaacacaccagcggcgcgtgcgtcgttggccactccatcatattcttcgcccttgtcacgaacttcttgctagccaaacgcgtccatgtcgtgattcggctcctaaccctagttgagttataatgtcttttaattttaattaattgaattgcatgttctacatcttgatgttacgacaggtaatgcgatgagtattggtttaaaa

SEQ ID NO: 592 - DNA, 307 bp, Lilium asiatic
  Clone ID: LIB3229-013-P1-K1-D9
ggactgggggccggtgtttgtggcggtggtcctcttcgtgctgctgacgccggggctgatcgtgcagatccccggccggagccgcgtggtcgagttcggcaccttccacaccagcggcgcgtccgtcgtcgtccactccatcatcttcttcgccctcgtcacgatcttcttcctcgccgtccgcgttcatgtcgtcatcggctcctaaccctagttgagttctcatgtcttttcattttaattaattgaattgtatgtactagatcttgttgttacgacaggtaatgcgatgattattggtttaaaa

SEQ ID NO: 593 - DNA, 307 bp, Lilium asiatic; identical to SEQ ID NO: 589
  Clone ID: LIB3229-013-P1-K1-E1

SEQ ID NO: 594 - DNA, 73 bp, Lilium asiatic
  unsure (1)..(73): unsure at all n locations
  Clone ID: LIB3229-013-P1-K1-E10
tctagagganccaagcnnacgnacgcgngcatgcgacgncanagcgcnncaatagngncaccnaaanncaann

SEQ ID NO: 595 - DNA, 418 bp, Lilium asiatic
  Clone ID: LIB3229-013-P1-K1-E12
cccaaagcttgaatcatgtctgggcggggtaaaggtgggaaggggctcggcaagggtggcgccaagcgccaccgcaaagtgctgagggacaacattcagggcatcaccaagccggcgatcaggcggctggcacggcgcggtggcgtgaagaggatcagcggcctcatctacgaggagactagaggagtgctgaagatatttttggagaatgtgatccgtgatgctgtcacctacacagagcatgcacgccggaagacagtgacggcgatggatgttgtgtatgctctcaagcgccagggacgcactctgtatgggttcggaggctgatcttcttctgcactgggatcgactgtgggggtatcgcttgttgttaggagtagatcttgttttctgctgtgagcttttgttggatcatgtt

SEQ ID NO: 596 - DNA, 410 bp, Lilium asiatic
  Clone ID: LIB3229-013-P1-K1-E8
ccgcttccatcccctccccggccgacgacgccgagcagcttcacaaagcattctccggctggggaaccaacgaaggcctcatcatctcgatcctctcccaccgcaacgccgctcagcgccgccacatccgccgcgcctacgccgaggcctacaacggcgaggatctcctcaaatgcctcgagaaggagctcacccgccacttcgagaacgccgtgctgttgtggacgctggatccggcggagagggatgcccagctggcgagtgaggcggcgaagaagtcgaaccatctggctctgattgagattggctgcgggaggtcggcggcagagttgctggctgcgagggctgagtatcatcagcggtttaagaggtctttggaggaggatgtggctgctcatactaagggagat

SEQ ID NO: 597 - DNA, 338 bp, Lilium asiatic
  Clone ID: LIB3229-013-P1-K1-E9
atccctttcccctgtcccggtgaatcgacggtgctgagcgactagcctgtatccttctagagccttcacgagcaatcaagaaggacggggacgattcaagatgcaattggagaggacaagagggcatggctattatctattaaagccatggagttggagctttttagcatggccctggactgtgcagccacttctgagggcaaccctattaagggtaccctcattctctctctctgtaaggcgtggtcgggaggtggaagggcttctttaggagtttcttttggttgaactatggagatcgtttgtcgtgcattggaggggatacgcgttgcactatg

SEQ ID NO: 598 - DNA, 295 bp, Lilium asiatic
  Clone ID: LIB3229-013-P1-K1-F10
ccggaatcaatgtaagaaagaaggtggaaaccattttagctcttataaatgataaggataaaatacaagcagtaagagataaagctgctacaaatcgtgacaagtattttggactgtcttcaactggaataacgtacaagtcaagttccacttcttatggttcgaccggtgagcgttatggtggcatgggcagtacaagagaggattcttcattcaaagatagctataaagacagagcaaactatggggaagaaactgactggaaacatgacaagaaagatggaagcagtaaatc

SEQ ID NO: 599 - DNA, 422 bp, Lilium asiatic
  Clone ID: LIB3229-013-P1-K1-F12
ggaattccgatccatttcctttggcttcaggataggcctaataagaaaacaaatatttccaattcatatatgaacatttttgcctgcgtatttcttgaaaatgtggaattggaattcctttcctttggcttcaggataggcctaataagaaaacaaataattccaattcatatatgaacatttttgcctccttatttcttgaaaatgtggaattggaattccccgaggaattccgatctcatttcctttggcttcaggataggcctaataagaaaacaaataattccaattcatatatgaacatttttgcctccttatttcttgaaaatgtggaattggaattccccgaggaattccgatctcatttcctttggcttcaggataggcctaataagaaaacaaataattccaattcatatatg

SEQ ID NO: 600 - DNA, 404 bp, Lilium asiatic
  Clone ID: LIB3229-013-P1-K1-F2
cggacgcgtgggatctagggttagggtttcctcctccactcccccacccgcaggaagggcagcgaattcttgaagaaatgggccagatccagtactccgagaagtacttcgacgacatctacgagtacaggcatgtggttctcccggcggaggtggcgaagctgctgccgaagaatcggcttctctccgagaatgaatggagagccattggagtgcagcaaagccgaggatgggttcactatgcgatccacaagccggagcctgacatcatgctttttctccgcccccttagggggcaacagcagcagcatgacagtgctgttgcggccgatctagaggaacccagctttacgtacgccgtgcatgctacttcatatcttttctatagggttaactaatattaa

SEQ ID NO: 601 - DNA, 410 bp, Lilium asiatic
  Clone ID: LIB3229-013-P1-K1-F5
gcaaggcgaaggtccgcgtcggtctaccgaagaagaagcccggcgtcttcaagcccgccgtcgacattcctccagccctcgccgcctccgccgccgccgctggggaggggtgggacaacaagggcagcgtcctcagcaactaccgctccttcggcgtcgtcgccaatcccaacatcctcagcgtccgcgcccgtaccccccacatcgtccagatctcggacctccaggtccccaatcgcgaagttcagcccgtggacgagttcgatcccatcgatagcggcagtgacctcgaatccgacgatttgaaacatgtacttggaaagagacggagggatgggaaaaaagctccattacagccattgacaactatgcaacgtgtttatgttggcagattaatagagaaacacggt

SEQ ID NO: 602 - DNA, 339 bp, Lilium asiatic
  unsure (1)..(339): unsure at all n locations
  Clone ID: LIB3229-013-P1-K1-F9
cccacgcgnccggngaaccaaaagnanangcaagngggcaaggcngaggcngggccgggggcgagggcncnngganangggnaggggnnggcccgccaaggnnnaggagangangancnnccggnnnncncncngcccccgaccccnccaaaaccngcggnaaggncgncngncgnngaggaaaccgnggagggangagaacngnngcnggngaggggcagcgncgcngnngaaggcngnnnnnaagnnangnnnagagcnnnnnaaaannnccngggnnaggaaagngggaggaggggcnaaagngaccggngagaannnaagnnaangnnangangc

SEQ ID NO: 603 - DNA, 339 bp, Lilium asiatic
  Clone ID: LIB3229-013-P1-K1-G1
cccacgcgtccggtgaaccaaaagtatatgcaagtgggcaatgctgtggctgtgccggtggcgagggctcttggatatgggttggggttggcccgccaaggtttaggtgatgatgatcttccggttttctctctgcctccgacttttccaaaacctgcggtaaggtcgtctgtcgttgtggaaactgtggagggatgagatctgttgctggtgaggggcagcgtcgctgttgaaggctgtttttaagttatgttttgtgcttttttatttttcttgggttaggatattgttattattggctaaagtgaccggtgagaatttaagttaatgttatgatgc

SEQ ID NO: 604 - DNA, 414 bp, Lilium asiatic
  Clone ID: LIB3229-013-P1-K1-G12
gaaaaagatcacaattttcacctacggcaaccgggctagggtttcagcggcgatggaggttctgtgcagcagcggcgccgcctctttcgagggcgttcacgcccgcaatgtcgaagccattgcggcgaagatcctgttggccgcggcagcgtcggctgcttggttcgtcttgctggtcgactctttgtgtgaaatcggtgtcttgggcatgacgccagaagccattgatgggaggatacctgtagctgctccaggaggaaacaaatctcaatctgtacctgagaacaaagatgccggcgattcagaagatgatgacgacgacgatgatgaggatgaagatgctgatgatcaagatgatgatgcgggtgaagaaaatgcctcagatgacgagggtgataaagaagaagatgatga

SEQ ID NO: 605 - DNA, 422 bp, Lilium asiatic
  Clone ID: LIB3229-013-P1-K1-G2
gtgaggctaagatagaagatctgagctctcagctgcagacgcaggctgcggagcagttcaaggcccctgatctgagtcatgtgatctcgaagcctgatgcttcggcctcagcacaggatgatgaagatgttgatgaggctggggttgagcctaaggatattgagctggtgatgacccaagctggagtttctaggccgaaggctgtcaaggcgcttaaagctgcggacggtgatattgttactgctatcatggagttgaccaactgatggcttttctgagagatgtcagcttcgtcttcttagcctatttgctttggtttggttacaaggatagtgtgggctgaactctgttgttttgcaactttgttttatatctatttcagacatggttgagttgtataagttgagattggaatccattta

SEQ ID NO: 606 - DNA, 279 bp, Lilium asiatic
  unsure (1)..(279): unsure at all n locations
  Clone ID: LIB3229-013-P1-K1-G3
cacgcgnccgaccggccagctgangacggcggccggcgancgccnccncgccggggggagcgccgccgccctccgcagcncagccgcccncncgncaccgcngcnaccngnanccccgcggcncggaaacgcaccncaagagcagaagnaccccncggcggccgngaacgcnngcagggacggancgaaancgnnnccgagggaccgccncaacgacggcnaccgcganngccccganggaacggangaaccgggaaccccngccngncccgagagcaa

SEQ ID NO: 607 - DNA, 421 bp, Lilium asiatic
  Clone ID: LIB3229-013-P1-K1-G4
ggcaagaagtgcgggaattagcaaatttgaaataacaaatgatcccaaggaagccgttaagggtgcagatgtggtgtattctgatgtttgggccagcatgggacaaaaggaggaggctgagtacagaaaacaacgcttcaaagggtttcagattgatgaagtcctgatgaagttggcggggccgaaagcattctttatgcattgcttacctgctgagaggggggtggaggtgacagattcagttattgaagcgccaaattccattgtcttcccccaagctgagaatcgcatgcatgcacaaaatgcaataatgctccatctctttgggttataatttctcgtcttgttagcgcctagtttacttgattaggtagttctaggctttggagtagaattgtaatactttgtttgagaattgatc

SEQ ID NO: 608 - DNA, 413 bp, Lilium asiatic
  unsure (1)..(413): unsure at all n locations
  Clone ID: LIB3229-013-P1-K1-G5
aaaggannnancaanacaaanggatttttctaaagggaaaaagaacaagnngatnacgaccaaaagatntgttaggcatataataaggatgaagttattatcaagaagtttcaattttatgtgtatcttatatccatgtttactaaagtaatacataaggtattattttatagttaactatggcattgggatgtgacatatatatcaaatataagtgatgattatattaagtgtggtaaataatttatattttattatcaatagataaatatatattatnttattttattagggataacatggtttgagaggtagatataatgaaaagttatctccacataatgaaaatacaatgaacaagtgtatttcttaatgtacctttttttctttgaatcatgttttaccctaagggg

SEQ ID NO: 609 - DNA, 424 bp, Lilium asiatic
  Clone ID: LIB3229-013-P1-K1-G7
gccggagacggtgcttgtgtgcaagctgaaccagtccccatgggatgtgttcacctaccctgccaccccttctcgcccggatccagaggagcgtccctcgtactcgaaggaggacatggaaaccatggagatagatggttcagctacggagaagacgggcgagaaggagaagaaaaaagtcagcatagacgaaaacgatacggaaggaagtcgagcagtaggagctacttctatttgcaagaagaccgatgggaagaagtggaaatgcaagcagtcagccgcctatgcgggctctttctgccactaccacctggctcaactccagtcctacagctataccggcagcaataacaacgttaaagctccggccaccactcgtaagaagagagcagctatggccgctgtctttttgggatcggatatg

SEQ ID NO: 610 - DNA, 342 bp, Lilium asiatic
  unsure (1)..(342): unsure at all n locations
  Clone ID: LIB3229-013-P1-K1-G8
ccggaacggaatggccggggggacccacgcgtgcggaaaaaaaaaaaaaaaaagagaaaaaaaaaaaaaaaaaaaaaaaaaaaaaagaaaggaaaaaaaaaaaaaaaaaaaaaaaaaaaaaaaaaaaaaaaaaaaaaaaaaaaaaaaaaaaaaaaaaaaaaaaagggggggcggcccaaaaggacaaaagcnaacgaacgggggaaggaaaagaaaaagcccngaaaaggggcaaccaaaaaaaaagcaaggggcgggggnnaaaaaagggggggacgggaaaaaccggggggaaacaaaaaaaaaaggccgggaaaaaaaaccccagggggaagggggggg

SEQ ID NO: 611 - DNA, 269 bp, Lilium asiatic
  unsure (1)..(269): unsure at all n locations
  Clone ID: LIB3229-013-P1-K1-H10
acagggggggaggacncagcaacgcgggcggaaccccgacgagccgccaaacggcaggnggacaacaaannaggggacaacccnangaggagggccaacaaggaggggaacggccagcggnggccgcggcggaaccaccaacgggggacaacgcnaccnacngngaaagcacacccaaggagaagcaagagaaaggacgggacaccacacacaaagagcccgacaccaaacccaaaggagcgggggggggcaggaggaagagggccaag

SEQ ID NO: 612 - DNA, 419 bp, Lilium asiatic
  unsure (1)..(419): unsure at all n locations
  Clone ID: LIB3229-013-P1-K1-H11
cccacgcgtccgctttgggagggaattcactcatgccatcgaagctaaacaggttgctgcacaagatgctgagagggcaaaatttattgttgagaaagcagagcaggataagagaagtgccattgttagagcacagggagaggccaagagtgcagagcttattggtcaggcaattgctagcaatccggctttcttggttctaagaagaattgaagctgcaagagaaattgctcagactattgcaaattcatccaacaaagtgttcttgaatgcagatgatcttttgctcaatcttcagtcagtcagcctggagaaccccccgaaacagaagtaaaatctcgggagggctggtctctctaccttgcattntatggtattttactgagttcctctttgtgagaactgctgtcttttggaat

SEQ ID NO: 613 - DNA, 427 bp, Lilium asiatic
  Clone ID: LIB3229-013-P1-K1-H2
ccagaggtcctcttccagccttccttgatcggcatggaagctgctgggattcatgagacgacgtacaattccatcatgaaatgtgatgtcgacatcaggaaagatttgtacggcaacattgtgctgagtggggggtctaccatgttccctggcatcgctgatcgtatgagcaaggaaataactgcgcttgcccccagcagcatgaagattaaggtggtggcgcctcctgaacgcaaatacagtgtttggattggagggtccatccttgcatcgctcagcacgttccagcagatgtggatttcaaagggtgagtatgatgaatctgggccggccattgtccaccgtaagtgcttctaagtttccagacttctgttaggtattggagtggttgtagtaagagtctgcatgaactcttgttctttgtagc

SEQ ID NO: 614 - DNA, 313 bp, Lilium asiatic
  unsure (1)..(313): unsure at all n locations
  Clone ID: LIB3229-013-P1-K1-H3
aaacatncnctcncaagaggangagganacccangacannnccctncaaanggccnaacaaancagnagnccgacgaccaganangancgagaaancanggngnnnacannggcgncgncggaaggagaaggccnaagnnaagcaagggncncncaannaagaanncaaaagnaaccgccaaaggaccacnaaanacnggngcnagncaccggcangagagngannncnggagaaaaccaganacaacncacaaangangaggcaaagaggancnccnnaagaancaaggagggggccannnaagnanaggag

SEQ ID NO: 615 - DNA, 384 bp, Lilium asiatic
  Clone ID: LIB3229-013-P1-K1-H4
ctccttctagcttactccaattatctcagccacgccaatcatgcggtgacatgtggcgagtactcagctactccggctgaactccgacgagccgccaaacggcaggtggactacattttaggggacaaccctatgaggatgtcctacatggtggggtacggccagcggtggccgcggcggatccaccatcgggggtcatcgctacctactgtgatagcacacccgaggagaatcgggtgtaaggacgggtcatcatactttttgagctcgacaccaaacccaaatgtgcttgtgggggcggtggtaggtgggccaagcaacgccacagatgcttttccggactctcgagcggcgttccaacaaatggagccgactacttacatt

SEQ ID NO: 616 - DNA, 276 bp, Lilium asiatic
  Clone ID: LIB3229-013-P1-K1-H6
gttccggctccatcgcccagtccttactcagtccacctgcgcggccaccaccaccacgaccaccaccaccaccatggttaattagctgttccttactgctcatttcttcttcaaggacttgtaggattgtaaccaaactttgcattagatttattccctctataggccactagcagttggttttttcatagagtcagggatgaatgagtgattcctctagcttggatttgtttagttgtaacatgtaagctatatgagattattaagatggtatgg

SEQ ID NO: 617 - DNA, 294 bp, Lilium asiatic
  unsure (1)..(294): unsure at all n locations
  Clone ID: LIB3229-013-P1-K1-H9
ccacgcgtccggcgagaatgatggngatggctcagagaacgatatggtggatggtgagcaacccgaacctatggaggatgctaaagctgacgtggaagcattctgagcaaaattttctgaaaaatagtataagactttgatttattggtttatatagatctgttgattaataacccaggtaattgggaggattatagttcatttgtgttgcacatcctgtttactgttaatgagactgattatactgttttcggcttggtacaatttatgataatatttggaattttctactta

SEQ ID NO: 618 - DNA, 372 bp, Lilium asiatic
  Clone ID: LIB3229-014-P1-K1-A1
ggcggcggtgggtcgtacacgggcgagttgttgagggacggtggtggagcctacaacgtcaacggtgttggtgggaggaggtttttgattcagtggctgtggaatccggtggttaattactgctcgggtccaaacgccgtcgaccagtagtgctggtagaactggtgatggtagtaaataaagctttgtttgtacaaacgatggtggagcactgtagtgggtttcaatggttgttttctctggagctctacatcataatatatgctctcttctctaatgtgatcaaaggaggagcaaatataatgtctgtaaaatttcaaatgtatggtctatgatcaaatttatgggattgttggagatttatcatgttaa

SEQ ID NO: 619 - DNA, 408 bp, Lilium asiatic
  Clone ID: LIB3229-014-P1-K1-A11
cttgaggattgcgaatgctgtttatacagatggacagtgtcacacggggtggcggggggaccgagactttgtttgttgaaatcttgaacaagtatatggacttttttgagacagggaatcctcagatcacgagttctgtgattcaagatctaattgatttgattgcaacggagatgcaaagcgagagcagcacatcagagccatctaaagatgctttctttgccagcacgctacagatatattcagttacagaaacacaaagggggcacgatcgttgagaaatatgagcccataagggtctagcacatcatggggtacacaagagatgtggatatgctcccttgcatcattataattctgcaacttttttttgaggtcggaagatgatgaacaaacttcgtatacaag

SEQ ID NO: 620 - DNA, 361 bp, Lilium asiatic
  Clone ID: LIB3229-014-P1-K1-A4
cttcctgctgtaggaggagggctgccggctgtaggcggagggctccctgctgttggtggtcttccggctgtaggaggtctccctgctgttggtggccttccggctgttggcggagggctgccggctgtaggcggagggttacctgctgttggcggtcttcctgccgttggagggctccctgttgttggcggtcttcctgctgttggtggtctagtccccggcggcaagccgtgatgaaatgcaggtggatggcttctgactcgcttgggcatagtgaacgatatattgcttttgtaccttaattctctcccatatagtgaccacattgcttattttcggataaaaaaaaatataaaatatt

SEQ ID NO: 621 - DNA, 200 bp, Lilium asiatic
  Clone ID: LIB3229-014-P1-K1-A5
gattcctcaggcatttatagggggtgttttcatagaaactttattttctctacttatcaaattttgtacaccagagtttaggtggatggtgatcagattgtgaattttgaattcttggattagtttataatttgttgtctatcgttgtgaagttgtaattcaaaatttgaaattaatttataccagtttatagattaaaa

SEQ ID NO: 622 - DNA, 418 bp, Lilium asiatic
  Clone ID: LIB3229-014-P1-K1-A8
gtgccttccttcttgatattgtactttgcgtacccgagtttggattggctcgttagggaaatcgtgaactgagactttctagttattgggatcttcatgtgcatcgagtttggattgagtcgttagggaaattgtgtactgagactagttattgggagcttcatgcgcacctctttgcttaagatcgttgaacgatggaactcgttggtgtgtgagatttctagtgtgattaaagatgtgggattactagtgtgattaaaaatgtgaaagaaggttgtggttatcagatgtttgttgtcgttatatcttgtatcccaaattatgttacgaatggctggcatatgaatactgaatggctggcatacgaatactgagtagaactggttctcatgtcggatttggaggaatgtaatgtaat

SEQ ID NO: 623 - DNA, 424 bp, Lilium asiatic
  Clone ID: LIB3229-014-P1-K1-A9
cccacgcgtccggctaagtactctatggtttgggtctttagcgggtctattgatagagattaatcgtttattcccagacgccttgtcatttccttttttttgattctagttattgatatgcaaaaaaataaaaaaattagggatttaattctatgtgacgtgattaaaaaaaaaaaaaaaatgtattaaacccaaacaaaaagttgatctaataaaattatatttggaaaaacataaatagaaatgcgggtccagtctaggagaggctccacgaaatcataacacagtaaagaagatacataaatgaaatattggtattagtataagaataattgatagttagaaaaaaattgtattacttaaaattatatataatattataatatataattgatatttaaataaaattaaataaaaaaaatat

SEQ ID NO: 624 - DNA, 419 bp, Lilium asiatic
  Clone ID: LIB3229-014-P1-K1-B5
gcggctagggtttttgctgggacaaaatcaaggagagcagcgatggcgccgccgcagccgaagtccggcctctttgtcggcataaacaagggtcatgtcgtcactaagcgggagctggctcctcgtccttcgagccggaaagggaaaaccagcaagagggtgcattttgtcaagaacttgatcagggaagttgctggttttgctccttatgaaaagaggatcactgagctcttgaaggttgggaaggataagcgtgccctgaaagttgcaaagagaaagttgggtacacataaaagggcaaagaagaagcgtgaggagatggctaatgttctccggaagatgagatctgctggtgtgtctgagaagaagaaatgatgaatcttatggcacagactacaaatatgatcccactttttatc

SEQ ID NO: 625 - DNA, 365 bp, Lilium asiatic
  Clone ID: LIB3229-014-P1-K1-B8
tactgatcgcgtgcgttagctatagaggatccatgcttaccttcgccttcatgcgaggtggtagctattttatagagcgacacaaattaagttaactggacggccgtagacaacgtggcaactgagaaaacggctgcgttcacaacttaatggggtcgaaccacatacgaatgtgaagggctggggtgacaccaacaaagccaagaccgatcgagcttctcaacagttgttctggctgaatggagaatggaacgcacggtgaagaaccgcatcaacaacggcgggtgtggtgtgatacacgcatggtgagacatacactagacagagccctatgctgatatggttccgctttattctattgctat

SEQ ID NO: 626 - DNA, 348 bp, Lilium asiatic
  Clone ID: LIB3229-014-P1-K1-C10
aaggggcgggccacgcgtccgcggacgcatgtgctgacgcctctccagactcttcaacagcaccaacgcttgcgggggggatggcattattattattaactccctcattccccttctgtcgttcgtcgaggctgacgtacatctactactccaacatttgcgcctccctcgttcgttaactgccttaaggagcccttctaggccattgcactcacactctagaaggtttaccttgccatctccaatcgtgacggatttaagcccgtctagtcctggtactctcagtgataacatttgatgcattcaggctcaaggcactgtgtagtaatctaggctattttctgactt

SEQ ID NO: 627 - DNA, 349 bp, Lilium asiatic
  Clone ID: LIB3229-014-P1-K1-C11
ccgtcgcgtggcggacgcgtgggcgtctgcgggaacggaaagatgcaggggccaattaatctgtctgacgagagagtgcagattaatccattccttgtgacgctccatcgatcctatctgccggtgaccgtcgtaatgaagaaccgcgggcaccacattatgctcaagtgggtcggaggatgcaggcgaaatcaatatctatggaatgtactatgcgcataagcagcttcactgagactctgattgtgagcactacattaatgcaaacagagtctccatggatatgcacatggaccatgaaagcgcatacataaagaccgcactcgtaggcatactatacatgataggt

SEQ ID NO: 628 - DNA, 424 bp, Lilium asiatic
  Clone ID: LIB3229-014-P1-K1-C2
ccaggatggcaatgaggtcttcttcaggatcaagcgtagcactcagctcaagaagctgatgaatgcatactgtgatcgccagtcggtcgacttcaattctattgcctttctttttgatggccgcaggcttcgcggcgagcagacccctgatgaattagaaatggaggaaggagatgaaatcgatgctatgctccaccaaaccggtggtgcgaagaatgaagcatgatcagataatttagctactgtggagatttaaatgacagcgaatgttttccatggtagctctggttagctttattatctgatggaccttttggtgtgtgactgttggatgttttgcgttagattgttggaccatttggtttattgactgttggatcttgtttgccttttaactgaatattctggaaaagtggttctttgt

SEQ ID NO: 629 - DNA, 428 bp, Lilium asiatic
  Clone ID: LIB3229-014-P1-K1-C5
cggacgcgtgggcggacgcgtgggcggacgcgtgggcagcaccagcggcggcggcggcgatggcatcagcagcatcaacggcggcggtccccttctggcgttcggcggggctgacgtacatctcctactccaacatctgcgcctccctcgtccgcaactgcctcaaggagcccttcaaggccgaggcgctcacgcgcgagaaggttcacttcgccatctccaaatgggacggcggaaagcccgagaaggccgtcactcgcagcgatacaggtgaagcatgagggctcaaggcacttcaggtaatctaggcttttttctgacgtgtccgtctatgttaaggcaattgggcatgtggtaataatgttttgttacactcaaaaacttttgttataagctattgtcatagtttatgattcagaactggattg

SEQ ID NO: 630 - DNA, 428 bp, Lilium asiatic
  Clone ID: LIB3229-014-P1-K1-C6
gcaaaactagaagacgtgttgctcgtcagaagaaagcagtgaagatcttcccacgccctacttctggccccctccgtcctgttgttcaatgccaaacactcaagtacaacatgaaatctaggtcaggcaggggattttctctggaggagctgaaggcagcaggcattcccagaaagcttgctccaaccattggaatttctgttgatcaccgacgcaagaatcgttccttggagggccttcaagccaatattcagaggctcaagacctacaaggccaagcttgtcatcttcccacgacgctcgcacaagttgaaggccggtgattcttcaccagaggagctagcagctgcaacacaggtccagggcgcattcttgcccattgctcgtgagcagccaccggttgagattgtgaaggtgactgatgagatg

SEQ ID NO: 631 - DNA, 420 bp, Lilium asiatic
  Clone ID: LIB3229-014-P1-K1-C7
gcctggggtgtggaaccatatgatttggaggatgctgatagtaactgcaagacccttgtgcggaagggcattgtgcgtgtagctgacatcaagtttcctctgccttacagggcagactcttttaaccttgtcatagtgtcagatgcattggactacctgtctccaaaatacctgaacaggactcttctggaattggcaagggtatccacagatggtcttgttatcttttctggttatcctggtcagcagaaagctaaagtctctgagctatcaaaatttggaaggccggccaaactacggagttcctcctggtggataaggtactttgttcagactcgcttagaagagaatgaagctgcggcaaagaagtttgagcaggccgccaagaagaggtcgtacaagccaaactgtcaagttttt

SEQ ID NO: 632 - DNA, 236 bp, Lilium asiatic
  Clone ID: LIB3229-014-P1-K1-C9
gccatccttttgtgtcgtctaggactaaatctaattttgttgagcaacatgggctgttctgtatcctgctgtgatgattgaagtggtttattttcgagctctctagatatttgatgatttagttcagacaactagtgattctgcagagaactgaaaatgggtactgatgcttgagatatgtaacttcagagtacggttttagatttgggaagttttagtccattgtgtttggtaaa

SEQ ID NO: 633 - DNA, 381 bp, Lilium asiatic
  Clone ID: LIB3229-014-P1-K1-D10
gaacgaatggtcgggccgagccacccgtacgcgttcggactgtatataggatccatagctgtcatcagctttcatgcgagggcatagctcgtctatatgtgtcacctaaactcaactgactggccgccgatttacaacgtagagactgcgaaaaccctgtgcttaccgaactaaattgacttgaagtacatgccctttgcgccagctgatgtactagctaataggaccgtaccgatcgcgcttcccaacagtagcccatcctgaatggaggatgacacgcgccatgcatctgaggatcattctcattggatgaatgagctgcgtgcattcagaccatttcatttagtagcgccctagctccagctccttgaggtgatttat

SEQ ID NO: 634 - DNA, 360 bp, Lilium asiatic
  Clone ID: LIB3229-014-P1-K1-D11
tgaaactactgaagcaactgctgaggataaaagtagcgaagaaaaaggtgtgccagatttttggttaactgcaatgaaaaccaatgaggtgcttgctgaggagattcaagagcgtgacgaaggagccttaaagttcctgaaggacattaaatggtgtaaaattgaggaaccaaagggtttcaagcttgaattttttttcgatccaaatccctttttcaagaatcttgttctgacaaagacgtaccacatgattgatgaagacgatcctgttctagagaaagcaatagggactgaaatagattggtatccgggcaagtgtctgacccagaaggttttggtaaagaagccaagaaagggatc

SEQ ID NO: 635 - DNA, 406 bp, Lilium asiatic
  Clone ID: LIB3229-014-P1-K1-D12
ctcgagttgcaactgcttccaatgccaatcgaagcgcatccgctccgaaggctactgatcatcgtggaagtggggtgtcccaaaaggcagcatctggaggcgaatggcatcgcaggacggtgtatcaaggaagaaaccagccctctggctcagacaaaagtttcccctcatcgaaggtaaagcagatatacgtcccgaaatcacagacgggaaattctgtgaccggctgatgaagaatcgtgatttgactataccgagtgtgctgatgagtttgggtttaatctgatggcagtcttggaagccgagcccaaatttcgtatttagtcgtaatttatggaccacccaccaccccaccgtgtaggtggtgcattgtgacgaaactggcctcatttatggatgtagtttt

SEQ ID NO: 636 - DNA, 328 bp, Lilium asiatic
  Clone ID: LIB3229-014-P1-K1-D2
aaatagatctcgatcagctccgacgagactcgcatctcccgcgcatgacggcgccggtcgatggcttctctcgctgccaagaccggcgatgccgccttcgccgccatggagcgcgtgaatgcggagctggtcacactgacgtacggagcgatcgtgcggcagctcctgacggatctggaggaggttgacgtggtcaacaggcagctcgatcagatggggtataacattggaatccgagtgagtgatgaatctcttgcaaaatccaatatatcacgatgcgttgactccaaggatacagctgaagtgattgctaagggtggtttcaaaa

SEQ ID NO: 637 - DNA, 371 bp, Lilium asiatic
  Clone ID: LIB3229-014-P1-K1-D6
cccacgcgtccgcccacgcgtccgcggacgcgtgggcgctgactgataactgtgtgatcgatcaggggcttggaaagcatgatatcctgtgcattgaggatcttgttcatgagagcatgacagttgggccacactttaaggaggcgaacaacttcttatggcccttcaagcttaaggcgccacttggtggaatgaagaagaagcggaaccattatgttgaaggaggggatgccggaaaccgtgaggactacatcaatgagctcattacgaggatgaactagagatatggtgtgagtctcatactctcatcattagaaggatggtgtttaggggtatgcttgatctctaactcacgtggtgtattaccaagg

SEQ ID NO: 638 - DNA, 416 bp, Lilium asiatic
  Clone ID: LIB3229-014-P1-K1-D9
cccacgcgtccggttcgacgtcgacggcactctcacggcgccgagaaagttgataactccagtgatgcttgagttcatgcggaggttgcggcaggttgttactgtggggatagttggaggttcggatctgatcaagatctcggagcagatcgggagttctgtcatcaatgactatgactatgtattctctgagaatggtcttgtggcttacaaaaatggggagctgctcggtacccagagtttgaaatcattcctcggcgaagaaaatctcaaggaattcatcaattttactcttcgttatattgccgacttggatattccaataaaaagggggacgttcatcgaattccggagtggaatgctcaatgtctcacccataggccgaaactgcagtcaagaagagcgagacgagtttg

SEQ ID NO: 639 - DNA, 267 bp, Lilium asiatic
  Clone ID: LIB3229-014-P1-K1-E1
gtttgaagccatggctggacgagcacaactcttgcccgatttgtaggcatgagctgaggacggacgaccatgcttacgagagtcagaaagagcgagataaggaggcggaggaagagaggaagggcgcggcaaatgctcttcgtggaggcgagtttatgtatgtctgatgttcaacttctcttattgtaaacaatgcattgttgtaatatttggtaatgatagactcaaagtatttctcgatcaatgaattaagttaaatgtctcata

SEQ ID NO: 640 - DNA, 422 bp, Lilium asiatic
  unsure (1)..(422): unsure at all n locations
  Clone ID: LIB3229-014-P1-K1-E10
aacggaccgtcctttttatgattatctcgagtcttgcatgcggcacaaagcagaaatggtgatatttgaagctgctagagcaataacagagttgagtggtgtgaccagtcgggaattgactcctgctatcacttttctacaacattacttagttgaagaattatgagtaagaaaaacaaatcggtttctaaacaagacatgatccaaccttatttagggtccgaacagcagcaaaccgaagtactggcttggataagatctctaactttattcaaagcattcttaggtcaaaatgttgactactgtgatgacaatatttgttatgaactagcaacaaacctgtgcatggattggttacttgttcaaactttgcacatgggcaagagcaaaaatgctacatattagnaccattaattngtata

SEQ ID NO: 641 - DNA, 234 bp, Lilium asiatic
  Clone ID: LIB3229-014-P1-K1-E11
gttttcttttaggtttggcaattagggtttagagggtctagatgggccattgctcatttatgttgttggtgatgatgggagtttagggttagggtttaattgagaaggggcaattgaactgtttgattgtgggaaggatggatcttatgttttttttccctagattttaatggtttttgtataaactttgataatttaggttgaaaagtgttgtctcaatgttatttctgcatc

SEQ ID NO: 642 - DNA, 423 bp, Lilium asiatic
  Clone ID: LIB3229-014-P1-K1-E2
gatcccccggttgaaagagatggggctcaccttcaccaagctgttcagccggtggttcgcgaagaaggagatgcggattctgatggtcggtctcgatgcggctggtaagacgacgatcctgtataagctgaagctgggcgagatcgtcaccacgatccctaccatcggattcaatgtggagactgtcgagtacaagaacattagctttactgtttgggatgttgggggtcaagataagatcagacctctgtggaggcactacttccagaacacacagggactgatattcgtcgttgatagcaatgacagagatcgtgtggtcgaggcaagagatgagctttacaggatgctaaatgaggatgaactgcaggatgctgtgttacttgtgtttgcaaacaaacaagatctgccttatgcaatgaa

SEQ ID NO: 643 - DNA, 165 bp, Lilium asiatic
  Clone ID: LIB3229-014-P1-K1-E7
gcaggtacagttctttatattctgttaatttgcaggatgtcaagacttgtgaagtgtgatgacttgtgcttgtagtttaagaacatgaagcctgtgtattacttgagctttggttgctcctgtgttattttccctgatttgcctgatcaagtgctgcacatttgc

SEQ ID NO: 644 - DNA, 420 bp, Lilium asiatic
  Clone ID: LIB3229-014-P1-K1-E9
catttgtctacccatttggatggcaggaagtcgttatccaaggtcaagataaagttttcaaagatgtcattgaacctttagaaagtgccagcattaatattgttgcaactaccaagcaagatgtccgtgaacttggatccccaaaagaggttgctgagattttaatcaaaaaagttttggctcctccttcgcagaaaacaaagttaatcgaggcctcagagcatgatgttgatgggaaagcttattacacgttcgagttcattgctcaggctccgaactttactagacatgctcttggcgcaatttcagttggaaatggtaaattttacactttgacaacaggagccaacgagaggagatgggaaaagatgaaggatagattgcataccatcgttgattccttcaagctcttttctgtct

SEQ ID NO: 645 - DNA, 291 bp, Lilium asiatic
  Clone ID: LIB3229-014-P1-K1-F1
ctcccacctcagaacctttattaatctcagctcatcaacgaggtgtgttcgtaacaagggcggaaaggggctccaaaagggcggggctaagcgtcaccgaaaggtccttcgctacaacatccagggcatcaccaagccgttcatccgtctgctcgcccgccgctgcagtgtaaagcgcatcaactgcctcatctattatgagacccgcagggtgctgaatatcttctaggagaatgttatacgagacgcctttacctacaccaagcacgccccccctaagacggtcaccgt

SEQ ID NO: 646 - DNA, 328 bp, Lilium asiatic
  Clone ID: LIB3229-014-P1-K1-F10
ggggcggcccacgcgtccgtgagtggaagcaggttgtcatcatcagcgctcatagagttgaaggccagtcaacagtgggtataaatgccgatcctgtaactgataaaaaagaatatactttctttctttattatgattccttttcttttccaaagagtgatgaagaaatctgaacaagacgaggaaggagtggatacagatatccgtgcaattgcataaggatatatttcaatgacaccatttggtgctctttctcatatcgagattgtagcggtgccatgactaaaacaaattgactgttgcggatggtctaccattcaatatcatc

SEQ ID NO: 647 - DNA, 430 bp, Lilium asiatic
  Clone ID: LIB3229-014-P1-K1-F5
tgagtggaagcaggttgccaccgccagcgcacaaggagttgaaggccagtcaacaatgcatataaatgccgaacctgcaactgatgaaaaagaatatacttcctctctttctcatgattccctttttttccaaagagtgataaagaaatctgaacaagaggaggaaggagtggatacagatatccgagcaattgcagaaggatatatttcaatgacaccattaggtgctctttctcatatcgagattgatgcagtgccagacttaaacaattggctgttgcggatggtcgaccattcaacatcatctttatagaagatttgactagatggtaataaagttggaggatcatttgaagcagcttctctcttgagcctcgttggggtgcctgagtcttggagaagccaattattttatgtgaaagccatgtca

SEQ ID NO: 648 - DNA, 420 bp, Lilium asiatic
  Clone ID: LIB3229-014-P1-K1-F8
aggaaactgtcgctcaccagggcagtgttctatatggtcatgcagtgtcttggagccatctgtggcgccggtgtcgtgaagggttatcagaagacgctctacgagtctaacggtggaggtgctaatgtcgttaaccatgggtataccaagggtgacgggctgggtgctgagattatcggcacctttgtgctggtctacaccgtcttctctgctactgatgccaagaggagtgcgagggattctcatgtcccgattctggctccgttgccgattgggtttgcggtttttctggtgcatttggcgaccatccccatcactgggactggtatcaatcctgctaggagtctaggggcggttatcatctacaacaagaagcatgcttgggatgatcattggatcttctgggttgggcctttcact

SEQ ID NO: 649 - DNA, 418 bp, Lilium asiatic
  Clone ID: LIB3229-014-P1-K1-F9
cccacgcgtccgcccacgcgtccgcgctgatggtggggaatgtgctgccgctcagatcgatccctgaaggggcggtggtttgcaatgttgagcatcatgttggggatcgcggggtgcttgctagggcgtcgggggattatgcgattgtcatcagtcataatcctgataacggcacttccaggatcaagcttccatctggtgcgaagaagattgtaccaagtggatgcagggcgatgattggacaggttgctggtggcggcaggactgagaagcctcttctgaaggctggaaatgcctatcacaagtaccgtgtgaagaggaactgctggccgaaggtccgtggtgttgccatgaaccctgttgagcatccccatggaggaggtaaccatcagcacattgggcatgcttcgactgtgcg

SEQ ID NO: 650 - DNA, 445 bp, Lilium asiatic
  unsure (1)..(445): unsure at all n locations
  Clone ID: LIB3229-014-P1-K1-G1
cacgcccgtccggtggaatcatgaggatatggttataggtggatatgtgtggggcnagaagggctcttatggtaatcagggtgagttatgtgtgcctgttggtggtcgtggtatgcggtcccacaagcaaccactcctggtagtgcaggtgaacaaggttctggttcaggttatatggggggtggctatggtgatgcgactggtagtgtgggttatccaactacttggagatcggacccttcacagggagggggttatggggccggtcaggtgagtgggcctcctggtggtccagctggtttctgcagtgggttatggtggtggtcatcccaggcaggcccagtagttgtcatatcatgctggagattcctcatttctgaccttggtttgttctttcctttactgcaaagctgcatgattgtttttttgctggctgagaagagaa

SEQ ID NO: 651 - DNA, 314 bp, Lilium asiatic
  Clone ID: LIB3229-014-P1-K1-G12
gaaatttgtgacgctttgaaaaatttggaaggactgacgatgatcggggcatatgttgtccagtctgaatagcctttggaagaactgttatagctttgtaatttattgttggatcgatctgaaattttgtcaggatgtcaagggaatgtcggtgcatttatgtttaaaatttcagtcatattcaactgttcatgaagttatgacggttgtaaggcgggtcaaaaattttggattattttagaagctatttttgaaaattttacagtgatctaactcgtttttcttggtgtacaagtgaattttcttgtctccaa

SEQ ID NO: 652 - DNA, 423 bp, Lilium asiatic
  Clone ID: LIB3229-014-P1-K1-G3
ggagtccagtgagcgaagtggggaggaggtagatggtacagcagcagatgcgatgactccatttgagggggaacatgatagtgacagcaggggcgaagaagaagaagaagaagaagaagaagatgatgataatgatggtggtggttatgaggaagaagagtgtgaggagcagcaagcatccataggcaagaagattttacgctttttcacatcatgatagattcctgtgattgtgtgaagttcatactgatgtttgttgtattattagtgtttcaccactgtttgttattattggttccttgaaggcaaggtagttggtgtgtagcgttttcagggtcgtaattctgtaatctctcacttagcactgtggatctgagtttgtttgtattccatgccattcagaataacttgtagagttggaca

SEQ ID NO: 653 - DNA, 427 bp, Lilium asiatic
  Clone ID: LIB3229-014-P1-K1-G4
gcatcccctctccgtctgagattccccggttgagagagatggggctcactttcaccaagctgttcagccggttgttcgcgaagaaggagatgcggattctgatggtcggtctcgatgcggctggtaagacgacgatcctgtataagctgaagctgggcgagatcgtcaccacgatccctaccatcggattcaatgtggagactgtcgagtacaagaacattagctttactgtttgggatgttgggggtcaggataagatcagacctctgtggaggcactacttccagaacacacagggactgatattcgtcgttgatagcaatgacagagatcgtgtggtagaggcaagagatgagcttcacaggatgctaaatgaggatgaactgcgggatgctgtgttacttgtgtttgcaaacaaacaagatct

SEQ ID NO: 654 - DNA, 403 bp, Lilium asiatic
  Clone ID: LIB3229-014-P1-K1-G6
cccacgcgtccggggagaggcagggaaggggtgaggagaagcagaggaagctaagcaagggtagtgaagtgagcagcaggagaagaacatctggaaggaggcacaagattccgaaggcggtagatgaggacctctacaagatcccgccggagttggtctgtcgcaggccccaaaagaagagattactgggaagttttctatcaggatgcctgggcctaagctgcatcccttaaattttctaaagtatcagtggctatgttgttgttgcttttccaaccttttacagctatagaatcacagctctcgctgcttttaattctgtgttaatgagtttgtctaaactacaactgtatgtggagggactgtaaatgctttgtttgagaaataaaattgagtgagttgt

SEQ ID NO: 655 - DNA, 398 bp, Lilium asiatic
  Clone ID: LIB3229-014-P1-K1-G7
ctttaccagaggaaagtttctttagctggttcagtgaagatgatgacaatgggtccttggaaggtgtatttgatatggtggctgagataatcaaggaagatctttggcctaatcctttgcggtatttcaacaatgagattgaccaagaggattctgacgaagaagaaggagacggagagggaaagaccaatggtgaatttgaaagcagtgaataggatgaggatgaggatggtgatgaggacgaagatgatagttatcttttttgtcatctattttttcagcttttaagtttggtctgcttaatggttcatggaaaacttgtaactggtttgattgttaagggtttgctgactttttttatttaggtctgcttattggtccatggtaaactttttact

SEQ ID NO: 656 - DNA, 420 bp, Lilium asiatic
  Clone ID: LIB3229-014-P1-K1-G8
caggttcaccccggagctccgggatggactattcggccgggcaatgccagaactatttggccttcctcttcacatcaaaatgctcaacaaatctgatttgttgacgggcggctacatcgggcagatacccggaatggcttacgagggcttgcgagtcccagaggatgttgagaagttcacttgtacgatgtggcccagtggaaatccaaccttcagtgagactctctccacctttttaaagggtctgaaagacttggaacaaactatagcgcggatggtcttttctagtttgggcatagaaaagtactgtgattcttatattgaatcatcatactacggaattcgactggcagaatatggaatccccttagaccaggatagtaagattgccttgacagaacattgggatccaaaccttat

SEQ ID NO: 657 - DNA, 331 bp, Lilium asiatic
  Clone ID: LIB3229-014-P1-K1-G9
cggacgcgtgggcggacgcgtgggcggacgcgtgggcaaatggttgggtctggtatgagccagcaacaaatgtcacagacatatgttcaaggtcctgggaggtctcagttgatgtctcaggggaaaatgtcatcacaagggcctgggagtaacatgtcttctggcggatttctacctgatgggcatcactagacttcttttgcattaaattattggggtttttttctgtttaacttttggtcctaacataagttaggaatttacaatatttcaaactattccaagatcgttttctcggtagataactaataatggggttatttgttctaaa

SEQ ID NO: 658 - DNA, 432 bp, Lilium asiatic
  Clone ID: LIB3229-014-P1-K1-H4
gggacattatggttgacttgttcttctatagggatcctgaagaggcaaaggaacaggaagagggggaagctcctgtggttgattataatccaaatgttgattatgttcctgggcctgtagtggacaattggtctggggttgattatccaccccaagctgttcctcaggctgctggagctgattggggtgtcccccaagttgcggcagaaggtggttgggatgctgctgcagctccagctgttggtgttactcctgttgctgttggaggatgggatccggctgctcccatggagggtgagcttcctgctgctacaggatgggattaactagattatgtggtatatcgtcttataagttcagaatttttgggttgcttttagcttatgagaaacaagttaatgagttactgctgtctgagctacttcctatttt

SEQ ID NO: 659 - DNA, 437 bp, Lilium asiatic
  Clone ID: LIB3229-014-P1-K1-H5
cggacgcgtgggttcgttgatagcgaagatgaccgggaaggcgaagccgaagaagcacacggcgaaggagatcgctgccaaagtcgacgcggcaacgacgaaccgcggcggaggcaaggctgggcaggcggaccgcatcggcctcgacaagggcggccacgcgaagctggagtgccccctctgcaaggtaaccgctcccgacatcaagtcgatgcagatccaccacgacgcccgccatccgaagatccctttcgacgaaacgaagctgaataacctccacgccttcaccaccgtcgtcggcgacacctccaagccccgcccgggggtccgcgggtccctcaagaagtagccgtctcccttacttactgcttagtttctctttcgattattataatcatgcctatgcctagctaaataatagaaccgtgaatgaacaa

SEQ ID NO: 660 - DNA, 411 bp, Lilium asiatic
  Clone ID: LIB3229-014-P1-K1-H7
aatggcagaggagatcgcgaagtccggcgacggcgaggccgccgtccacagggtgtacgttgaccgtccggagggcgaggaagccgaggcttttcacatcaaagtcctctcctccgacgtcggcagtgtggaggccgcgaaggaggctgtggtctaccactacacgcatgccgccagcgggttcttcgtcaagctgactccgaaacaggttgccgatctgtctgagaaaccagaggttcttcaggtgcaggcctgcaaaacctatcagctgcatggacaaggagcgagtgttgggggcgtacgcccttcctgcctgttagctttggaaagctgttcctgtgccatgaaaaccttgctcttaagggatctgttgtgcggtgtatatagtgaaattttgtaatctaactcatt

SEQ ID NO: 661 - DNA, 421 bp, Lilium asiatic
  Clone ID: LIB3229-014-P1-K1-H8
cgcagcgcctcctcagcgagccagcgcctgggatcagcgcttccccgtcggaggagaacatgaggtacttcaacgtgatgattctcgggccgacgcagtccccgtatgaaggaggagttttcaagcttgaacttttcttgcctgaagagtatccgatggctgccccgaaggttcgctttctcaccaagatatatcatcctaacattgacaagcttggtcgaatctgccttgatattctcaaagataaatggagcccggctctgcagattcgaacagttttgctgagtattcaagcacttctcagtgccccaaacccggatgatccactgtcagagaacatcgcaaaacattggaagtcaaatgaagcagaggctgtagaaacagcaaaggaatggacccgtctatatgccactggggcttg

SEQ ID NO: 662 - DNA, 397 bp, Lilium asiatic
  Clone ID: LIB3229-015-P1-K1-A11
atcaaggagaagttagcctatatcgctcttgatttcgagcaggagatggagacagcgaagactagctctgctgtggagaagagttatgaactgcccgatgggcaggtgattacgatcggggctgagagatttagatgcccagaggtcctcttccagcctttcttgatcggcatggaagctgctgggattcatgagacgacgtacaattccatcatgaaatgtgatgtcgacatcaggaaagatttgtacggcaacattgtgctgagtggggggtctaccatgtttcctggcattgctgatcgtatgagcaaggaaataactgcgcttgccctcagcagcttgaagattaaggtggtggcgcctcctgaacgcaaatacagtgtttggattggagggt

SEQ ID NO: 663 - DNA, 381 bp, Lilium asiatic
  Clone ID: LIB3229-015-P1-K1-A2
gttcgacgtcaggctgtggatatctcccctttgaggagagtcaaccaggcaatttacctcctcaccacaggtgctagagaaagcgcattcagaaacatcaagacaattgctgaatgccttgctgatgaactgatcaatgctgccaaaggctcttccaacagctatgcgatcaagaagaaggatgagattgaacgtgtagccaaggccaatcgttgaacaacggaatgcagggtctgggtgctttatgttatgcattactttgttttgtagctgcaacagttatggtgttacttcaatttcagactgttggtatgtaagtgatgccggtttgttattttgtatttgaatttttgcgaagttattgcaatttaattactgctc

SEQ ID NO: 664 - DNA, 412 bp, Lilium asiatic
  Clone ID: LIB3229-015-P1-K1-A6
ggaccattaagtaaatctctattatggtctagttatgatggttgtaaatgacgtagtacatggaagtaagcatgttgcaaaatgatgtgtgcacgccatgactctcattgacaactagattagccaagacacttatgataaccgactaacgaagtatttagcatataatgcgcgccttatgaatcttaatatgaaaacattaatggatgttcctatagaccaagtgggagactgtaaggaaattaccgttaagaccattacttgggccacacgttccttcccttcctcataatatggtcgttatagggaatccgttttcattggagatatgctataataaccgaatacggtttcctaaagagatctattcaaaacctaactctatcttgatggaagatcgagactaaataac

SEQ ID NO: 665 - DNA, 314 bp, Lilium asiatic
  unsure (1)..(314): unsure at all n locations
  Clone ID: LIB3229-015-P1-K1-A7
agcaccgaaacgaggaaaagcagaaggaagggaaacagagaacggccacaaagagccaaagggggcgggacagaaagcaaaggaagaggccaagaagcacaggcacgaagaagacaaagancgccaaacaaagccgaaaggagacnaggagcaaagccaaccccaagcacaagaagaggaaccgcgcgaccaggacccagagaagcgccacaagacagaggagaaggagcacgaccaagaggggaagcagcagcacgaggggaaccaaaggggaaaagagcaagcaaaaccagaagacccgggaagagggggaa

SEQ ID NO: 666 - DNA, 267 bp, Lilium asiatic
  Clone ID: LIB3229-015-P1-K1-B12
caggaaggaagcataaatccagagatgcaaactttgaattcctgatatacttgtcatttcgcccaaaatttcttctctccggagctggattttacgtattgggataattatcaattgaatactctgggaaaaattgacagttttgggtggagtttccctgtgagttgaatggtaagggaaatgagtgaaactgtaactgttcgtcttgtgttaaagaacactgttgcggagattcaattgtgcgatggtccaagagttttttacttc

SEQ ID NO: 667 - DNA, 295 bp, Lilium asiatic
  Clone ID: LIB3229-015-P1-K1-B2
cccacgcgtccgcttggacttgggtataacccaagcataagcatggaggagattaggaatgctgcagttgtccatttcaacgggaatatgaaaccatggctcgatattgctatgaatcagtttcgaacaatttggacaaagcatgttgactatgatatggagttcatccgtcagtgcaactttcaagcatgacggagataatcaaagttaaagctcctgcttctggcgcaagtatattattttccatccagtgttcgatttaaagatatgtttctactgtttaatattagtatcc

SEQ ID NO: 668 - DNA, 384 bp, Lilium asiatic
  Clone ID: LIB3229-015-P1-K1-B3
gctagacgtccggctgggctatgtctatcatccaaggagaggcatccaggcgattgaccttgctaccacaggggcttgcaaaagcgcattcaaacacaggatgactattgctgtatgccatgctgaagcactgatcacagatgacgaaggctattacaacaagtatactaccaagaacaacgttaaaactggacgtgtggccatcgccgatcgtggtacagctgaaggcacgagcatggtgctttacgtgcagcattactgtgataggtatctgcatacggtatggtagttactttactatcagactgttggtgtgcttgcgatgcacaggatgccattttacatacgcattcttgcgacgctatagcaattcaatagctgctc

SEQ ID NO: 669 - DNA, 343 bp, Lilium asiatic
  Clone ID: LIB3229-015-P1-K1-B6
cccacgcgtccggagtacctttcacccactctccccttatgcatcgcagctatgtgtccgcttacaacatcattcacgtgacaaaatgatgacttatcactgccatggcccatataaccaggtaaacggccacatagctgcgatgcatatggggtgagtggttgataggtacctgcggacacgaggcatgacgcgtataatcaaaggtaaagcttctgctttatgcctcacgtatacaaaaaggcattcagtgtgcgatctaaagatattgtctctacttgtttaatgttagtatccataaaaaaaaaaaaggggtcagcgaaatataggatccaagcttact

SEQ ID NO: 670 - DNA, 396 bp, Lilium asiatic
  Clone ID: LIB3229-015-P1-K1-B7
cccacgcgtccggaattccataaatataaaaatttataaataatatattggggaagcaaaaattatttggatcatagattattattttgtcactaatatgagttgcttgaatttacaaatatttaagcaaaatatggaggttttatctagtgatagacgaattttttttattggagtcgtataaagtttttttttccaattttgtatgctctaaaggtagtgatgacctcgggtaagaaatctagtaaatataaaattatgggggatacggggtagtaaatgaaaattaggttgatatcatggtaaaagatggaaaatagttaacttatatcagtcctagataataatgttaactcacatgatttaataaaatatgagctttatggtttgctactc

SEQ ID NO: 671 - DNA, 415 bp, Lilium asiatic
  Clone ID: LIB3229-015-P1-K1-B8
gagctgtgtttgtactggactcaaggttccagactaaatcaattgatgcagaatgacttatacttgaagaaacagactgaatgatatctaaatctgaggctactataacaatcaaccttactgatgcaatagtagactatatccatgaaacttaatctggcatagcactgaactagacgttgactaacaaagtgaatgaatgtaatcattatttcttatacttcaagcgagcaaggaaaataatgagactcaagctgaccttaatttgtctctgacctcactaatcacacccatattttcagaactggtgattttagactcccagaatgataggttaactgcctacttatgtttcataaaggcagactgacagtcatatatattaattgaagaagataagcagaccacaagatag

SEQ ID NO: 672 - DNA, 403 bp, Lilium asiatic
  Clone ID: LIB3229-015-P1-K1-C1
attgacaaccctgatttcaaggatgatccttacatttatgcttttgacaatctgaaatatgttggcattgagctatggcaggtgaaatccggaacattgtttgacaatgttctagttgctgatgaccctgaatatgcaaagaagcttgctgaagaaacatggggaaagcagaaggatgctgagaaggccgcatttgatgaagctgagaagagtaaaactgaggaggagtcgaaggatgatgatgatgctgatatagatgatgaagatggttttgatgatgctgatgcagcggatgaggatagtgatctagagaaggaagaggatgctcatgatgagctttagatggaaggcagatggactgtttcagtagcagattttgtttgacagataatctgggtagtca

SEQ ID NO: 673 - DNA, 409 bp, Lilium asiatic
  Clone ID: LIB3229-015-P1-K1-C10
ctccggtctggtggaaatgcttacatgattggtgaccctgttacgcctgaacgcaactggcacatctattatgctactgacaagcctgagaagccgatggtgactcttgagatgtgcatgactggcctgagcagtgacaaagcgtccgtcttcttcaagagttctgctgacggccatactcgctcggccaaggagatgactaatgtttctggtatctcaaacatcatccctgagatggatatatgtgactttgactttgacccctgtgggtactctatgaatgggattcatggttcggctctatcaactattcatgtgaccccagaggatgggttcagctatgcaagctacgaggcgatgggttttgattctagtgctatactgtttggtgacttggttgagagggttc

SEQ ID NO: 674 - DNA, 410 bp, Lilium asiatic
  Clone ID: LIB3229-015-P1-K1-C11
accatcctgggcagattgggaatggttatgctcctgtccttgattgccacacctcccacatagctgttaagtttgctgagatcctgaccaagatcgacaggcgatcgggtaaggagctggagaaggaacccaagtttctgaagaatggtgatgctggtatggtgaagatgattccgactaagccgatggtggttgaaaccttctctgagtatcctccactggggaggtttgctgtgagggacatgaggcagactgttgctgtcggtgtcatcaagagtgttgagaagaaggatcccactggagccaaggttaccaagtctgctgtgaagaagaaatgaatcgaagggatttctgcactggttttcggtttgcttgttgttggtggtcttgagtttgtgtcgttttggtgt

SEQ ID NO: 675 - DNA, 412 bp, Lilium asiatic
  Clone ID: LIB3229-015-P1-K1-C2
cccaaatctccaaccctttctttctccatggctcgcaccaagcagaccgcgcgcaagtccaccggcggcaaggctccccgcaagcagctcgccaccaaggcggcgcggaagtcggcgccggccaccggcggcgtgaagaagccccatcggttccgccccggcacggtggcgttgagggagatccgcaagtatcagaagagcactgagctcctgatccgcaagctccccttccagcgcctggtgagggagatcgctcaggacttcaaggccgacctccgcttccagagctccgctgtctcagcgcttcaggaggcctcggaggcatacttggttggtctgtttgaggacaccaacctgtgcgccatccatgccaagcgcgtcaccatcatgcccaaagacatccagcttgccc

SEQ ID NO: 676 - DNA, 414 bp, Lilium asiatic
  Clone ID: LIB3229-015-P1-K1-C3
gctctccctcatcacacccctcctacccagctgctgcggctcctctctatccttatgacaggacagtgggacatggtgtctatggtagccgaagccctccagctctaagggatccttacgctgcatactcaccagaagtggtaccttctgctgttcttggatccccatactcccctgctccaatgcactatccaccctatggtgggtacaccaacggaggctacaacaatgttctgtcacctggatatcaaccgtcacctggatatcaaacggcttactaccggtaggatcgatgctgataccttgacaaaatggtaactctgatgacacggtcactcgccgaatcgcctattttgtagtgactaactacaatagtaggttttatgttgtgtgtgcttatgaatagttggactc

SEQ ID NO: 677 - DNA, 164 bp, Lilium asiatic
  Clone ID: LIB3229-015-P1-K1-C4
tgggtttgctgagtttctgtcctactagcgtcaagtctgtcagttggttttctgctttgttttgcagtttgtggtgttcttattctgctgcttggaatgttgggtcttgtttggtctgatataatgtgtctgttgaaggaataataaaataaaagtttgtttgg

SEQ ID NO: 678 - DNA, 316 bp, Lilium asiatic
  Clone ID: LIB3229-015-P1-K1-C5
aaaagctcgaatttgcgtgccaaaatgaggaaaggatcaaagctcaagaagaaaaagagacgtagcaagcttgatgaggatgtgctctcggatctataagtacccctcctcccccattggattgaaggtaagaggtctcactccggaccgagtgggggagggcatattgttggcacgactttctctcggttttggaggagacacatcttaagaggtgtataaagagttcttgagagtccaggatggatattctttatcatggaacttggtggagtcatagaaacgaggcatgaggttgtgatcctaacaatattct

SEQ ID NO: 679 - DNA, 414 bp, Lilium asiatic
  Clone ID: LIB3229-015-P1-K1-C6
acgcacagtagcaccattcgccggaaacaatatgttggttttgtaccattgtcctggcaatctgtccaatgacgtcccatctggtgatcatggaagcaaatattttgtgcaagttctgcacaatgaagttccagttgccatgcctggttgtggcaacgtggagctctgcccatttgaggttttcaaggaacaaatcgtgaagcctcatctaaagcatgacttcaattctgtttgcaaagtaaagcttgaattgccagaatcaacagagccctcttccacttcgtggatcaagtttactgatcagtgaagttgcgagtttttgagctgctaggacgcgtaactggttttactcgtctggttgtatcaactagtgtcccacttttgagttttactatgatcgtatgtacatttctt

SEQ ID NO: 680 - DNA, 414 bp, Lilium asiatic
  Clone ID: LIB3229-015-P1-K1-C8
ctcagaatcaataacgtaagagggattatattgatctttaacagctccggcaagggatttttcaatattgaagatgactctaagcaattgctcggctcagcttccctcccggagtgtgtgctggtgtaaattgttgcaaaaaccatggatcttttgatttcttcaacatcgcagcaaaaaccataataaatttcaaaaaggaaagcttcaatgacacttcattaacaaaacaatcaaggactagttgatgaacaaatttctagaaagctctggaactgaactactccggcgagaagcaatggctagatcagcgcataagcttgtgaagcttcaaagatgctctcggccgggtgtccccttctttttgctgcagcttatgggggatttatagcggaggagaacgagggctggact

SEQ ID NO: 681 - DNA, 413 bp, Lilium asiatic
  Clone ID: LIB3229-015-P1-K1-C9
gctctccctcatcacacccctcctacccagctgctgcggctcctctctatccttatgacaggacagtgggacatggtgtctatggtagccgaagccctccagctctaagggatccttacgctgcatactcaccagaagtggtaccttctgctgttcttggatccccatactcccctgctccaatgcactatccaccctatggtgggtacaccaacggaggctacaacaatgttctgtcacctggatatcaaccgtcacctggatatcaaacggcttactaccggtaggatcgatgctgataccttgacaaaatggttactctgatgacacggtcactcgccgaatcgcctattttgtagtgactaactacaataggaggttttatgttgggtgggcttatgaataggtggact

SEQ ID NO: 682 - DNA, 412 bp, Lilium asiatic
  Clone ID: LIB3229-015-P1-K1-D10
cgagtttaaattcaatggccggacgaggtcgcatgccgcggcagcctttcgatgatggccggcgaggctttcccgatgggccgtacgcccgcggccctcctcgcggtcatccggcgcaactcgaagaagaaattgagatccggaatgctgatatccgccgtctcatagctgacaacacccggctgtccgaggatcgccagattctgcagcgagagttggccgctgcgagggatgagattcatcgcctgaattttgtgattaaggatattcaggctgagagggaagcgcagaatagggaaatgattgagaagggattgaagctggaggctgatcttagagctactgagccactgaggagtgaagtcatggtgcttcgtgctgaaattcagaagtttggatccgtgaaggagga

SEQ ID NO: 683 - DNA, 261 bp, Lilium asiatic
  Clone ID: LIB3229-015-P1-K1-D2
cgacccacccgaccgcgcaagcaaccgcactcgaacagccaatctaactaccccatgcctacaacgagagtgctttacaatggtgccacctaaatccaattacctgacctcacctcatacaactgcgaaactagaaaaacccttgctattcccaacttaatacacttacagtacatcccttactcaaaatctgacgtaacatcgaagacgcccaaaccgaaggcccttcagaacaacacctcatgccgaatagctaaatga

SEQ ID NO: 684 - DNA, 415 bp, Lilium asiatic
  Clone ID: LIB3229-015-P1-K1-D4
gtgctctgcaatcatggtggtcgctttgggttctggcaagttctacggcagtgccctgccgcggccccgcttctacaccgatttgaagctcaactcggagcggatcgacccgccatcgtcggtgatggcgccgctcctcgcctgggctcaggatgctcactggtccatgggcggtctgagcttccagcgcactcgcctccagggccgcatcgagggttcggtcaagaggctccgcgcccagcaagaagaccgcgcccggaagtcgcccacaccgaccaggatcaagaaggtccctgttgctgctgagaagaccccgtcttctccctcttcggtggacactgtagaaggtggggaagtggttcttgtggtgaaagacggggaagtgtatctggctgagtaccattcaaattttgat

SEQ ID NO: 685 - DNA, 416 bp, Lilium asiatic
  Clone ID: LIB3229-015-P1-K1-D8
aattggtaaagattttcaagcagaagtgccagaatgggctggtccagtctccaacaagagtagttattttgaagaaccttttgaactggatcctactgatttcctgactatttggaatgtcagcaagcctgctattatttgcaattggcttcaatgtcaggaggtgacatacgaagacgatgatgattacgagggaaccaaatgctcaaagtggcgcagggctccactttttgaagttcaaactgaagactgggattgttcttgtgctgtgacttgggatcccatctatgccgattgtgctgttcctcaggagctggatcagagcatagttcagaagcatttaaaatatgtagaggagtggagatcgatgctggccgcgaatcagagagctcgtgaaaacaataatcgccgtcgtc

SEQ ID NO: 686 - DNA, 414 bp, Lilium asiatic
  Clone ID: LIB3229-015-P1-K1-E1
gtcccaactcgtcagcgatgtcagggcgcggcaagggcggaaaggggcttggaaagggcggagcgaagcgtcaccggaagtgtctccgcgacaacatccagggcattaccaagccggccatacgccgtctggcccgccgaggcggcgtgaagcgcattaacggcctcatctacgaggagacccgtggggtgctgaagatctttctcgagagtgtcatacgggatgcggtcacctacactgagcatgctcgcctgaagactggcactgccatggacgtggtctatgcactcaagcgccagggccgcactctctacggcttcggcggctgatctatctatctatctagggcttttcttgttgggattatggatcggaacttgcgattttgctactcttgcctgtcagctttaatgg

SEQ ID NO: 687 - DNA, 75 bp, Lilium asiatic
  Clone ID: LIB3229-015-P1-K1-E12
cctacccatccacacactacctttaattttacatcctcaaactccacccgggagggctttttcatttattcaact

SEQ ID NO: 688 - DNA, 283 bp, Lilium asiatic
  Clone ID: LIB3229-015-P1-K1-E2
tgatgacacctataagttattggttaacttcttaaagagcaaatcgagtgtgcaaagttaaagtgtcaagtccaatgatagaagagagtattgtagtcaaaatttgaacgctattggtaggcggactggtcccggattcgcactcttgacaaaggtcaagagttcgaatcccgaaaaaaacatgatggtaggggattacctttacgcctcaatgctccgggcggaaatttgccgtggtgcgcacgagctagcctgggtaaaattatgctaaaaaaaaaaaaca

SEQ ID NO: 689 - DNA, 416 bp, Lilium asiatic
  Clone ID: LIB3229-015-P1-K1-E3
cccacgcgtccggcttattctgagtcaaatgtttcttctggtgaaaatcaagattctcctaaatatacagagtcaaaggatgatgataagtatgatggatctggtcttccctgtgaggcatggtggaaaaggcatgcagcatgtttatatcaccatgcgaaggaggcaaacacattgtggtctgtcgttgtggctgctgctttaatgggccttgtgattttgggcaagcagtggcagcacgataaatggcgtatcaatgatgagaagctgaatcgggtgctcggaccagatggccggttcaaagacgtcttggtcggtggctctcgacgcaatcctctgacccgtgatggcgctgctgctgggcgctgagtcaactgacagcaatgagatgatgacgaacattaagtgagactggc

SEQ ID NO: 690 - DNA, 417 bp, Lilium asiatic
  Clone ID: LIB3229-015-P1-K1-E4
agggcagttcatagtgcagtctctcagcattacctttctggtgtttttgctggtgattactgtcacattgtcattgcttgcgatactggaaataaagtggtcaggcatcacacttcatgaatggtggaggaatgagcagttctgggtgataggaggcaccagtgctcatccggctgcggttcttcaagggcttctcaaagtcattgcaggcattgacatctccttcactctgacctcaaagcctgctacggatgaaaatgatgatgcatttgcagagctgtatatggtgaaatggagctttctcatggtacctccactcacaatcatgatgatcaacatgatagcaattgcggttggggtggctcggacgatgtacagtgaggtccctcagtggagcaagcttcttggcggtgtctt

SEQ ID NO: 691 - DNA, 441 bp, Lilium asiatic
  Clone ID: LIB3229-015-P1-K1-E7
tccggaatcgcaggtgtccgcccaggcgctacccgtacgatgcgccatgtggtgatcaatgtcaacttgcagcgcgtgagtgcagaaccaggggagggtcaggacacaagtggtccggagggtgcggcggtcaacatgcaggacatcattaagccggccattcgtcgtctggcccgccgaggcggcgtgaagcgcatcagcggcctcatctacgaggagacccgcggggtgctgaagatctttctcgagaatgtcatccgcgatgcggtcacctacactgagcatgctcgccggaagactgtcactgtcatggacgttgtctatgcacttaagtttcagggcctgactctctacggtttatgcggctgatctatctatctatctagggttttttttgttgttatcatatatcgtatcttgtgattttttttctcttgtttt

SEQ ID NO: 692 - DNA, 364 bp, Lilium asiatic
  Clone ID: LIB3229-015-P1-K1-E9
cggacgcgtgggcaaaaaaactgctcaatagccaagagtaccatataaaagatactaaatccgaaatataaaaacatcatacagacaaacaagtcactgaaaagttctgaagaacaaattaaaagacagaacaacacatgctgaaagagttgagaatgtttcattcacgggtaggacattcctatttggcaacagcatctatgaacgctcttccaggctggcgattagcaagagggccatggcatccaagcagcttagcatttactccatctgggactatgcggttcatacctttccacatattatagtcactgcggttatatttggtaaagccccacttcctgctgacaatgatcttctgacg

SEQ ID NO: 693 - DNA, 221 bp, Lilium asiatic
  Clone ID: LIB3229-015-P1-K1-F11
cctacccatccatacacaatctgcaattctacatccgcaattatcacctgcagggccctttccaaagattcatctaataccaattaaccaaacctcaattcacaacctcatgacttacacaccaatatctttctaaaacatacgtgacatttaacttaattactcttataccaaattctctttataacacttgatacccaaacaataaatctctcatccta

SEQ ID NO: 694 - DNA, 338 bp, Lilium asiatic
  Clone ID: LIB3229-015-P1-K1-F12
caaagggctgaagaaaagctacgagctagggcctgggaaggttatatcaggaattgtgaagaggatggataggggtgctagcattgagaacattggtgcatgagagccacctaataatgcaactgcagtaggttcccttgtgggattccgttttagatggagtttaaaccttcgttggtcgctttgacgatggattcaaagttcaaaattgatggttcaatctaggagactcaattctcatgccaacctcggagagggattgagttatggtagtacagttattgtggagacacctgagtgtatgacttattgttgagatatcgagcattatattgtat

SEQ ID NO: 695 - DNA, 376 bp, Lilium asiatic
  Clone ID: LIB3229-015-P1-K1-F2
gggtggggggtggaggagctgagtgtgcatcagagtcaccagttgatgtgggtgagggcgaggcatttggtgtatgactattgctatgatgctgccaggttcaccgtgaagccgccggagtgttgacggtgagcgagggaatttgtggatggagactgtataaatggaaatgataggttggggtgcacgggccgcgaactacttgtactttcgtttgtgggttattgtttatgtttgttgttttgtttgatatgttaattaaatccttttcgttttcaacatgtggggatggatgggtactgaaatttggtaacgaaagatgtatgtggagttggtggatggaatctgatgctgcagtgttatgcggttggggact

SEQ ID NO: 696 - DNA, 414 bp, Lilium asiatic
  Clone ID: LIB3229-015-P1-K1-F3
cccacgcgtccggcttattctgagtcaaatgtttcttctggtgaaaatcaagatggtcctgaatatacagagtcaaaggatgatgataagtatgatggatctggtcttccctgtgaggcatggtggaaaaggcatgcagcatgtttatatcaccatgcgaaggaggcaaacacattgtggtctgtcgttgtggctgctgctttaatgggccttgtgattttgggcaagcagtggcagcaagataaatggcgtatcaatgatgagaagctgaatcgggtgctcggaccagttggccggttcaaagacgtcttggtcggtggctctcgacgcaatcctctgacccgtgatggtgctgctgctgggcgctgagtcaactgacaacaatgagatgatgacgaaaattaagtgagattg

SEQ ID NO: 697 - DNA, 302 bp, Lilium asiatic
  Clone ID: LIB3229-015-P1-K1-F7
cccacccatccacacattaactccaagtttacatccccaatcatcacacggggggggtattctattgtttcaactaatttcaatacacctaaactcacttcacaaccttatgattacaccaccaataacctacacaacacttcatgacttccaacttaatattctaaaaccatattttctttatcacaatttaactcctaacaaaaattctcccatcttaaatccctaactcaatcttgataaatctcccttaatatattcttcactcttatcgctttatttttaacctctaccctcttaat

SEQ ID NO: 698 - DNA, 247 bp, Lilium asiatic
  Clone ID: LIB3229-015-P1-K1-F8
gttctgcagtgtcagccctgcaggaggcggcagaggcatatctggttggtttgtttgaggacaccaacctttgtgcaattcatgctaagagggttacaatcatgcccaaggatattcaactcgctcgtcgcatccgcggagaacgtgcctgaaattctaattgttagtgttgctttgctgttaactttgggggctttgttttagtaaactgctttgttgcggcctttttctgaaaaaaaaaaacatg

SEQ ID NO: 699 - DNA, 410 bp, Lilium asiatic
  Clone ID: LIB3229-015-P1-K1-F9
agcagggaaagaaagaatgctttgcatcatgcctcttcatttgttatgacctgatccgtcctgatgtggcactagagctagcttggatgaacaatatgattgattttgctttcccatacctcttgcagtttatccgtgagtatacgagcaaggtggatgagctcgtgaaaagtaaactcgaagcacaaaatgaagagaaagtcaaggaaaaggaagaaaaagacatggttgctcagcagaatatgtatgcgcagttgctgcctcttgcattaccagcacctccaatacctggcatgggaggagtttgtggtcctttcgcaggtccacctccgatggggatgcctcctatggggatgccggcgatggctcaatatggcatgcccccagtgggctattagggttggcgatgg

SEQ ID NO: 700 - DNA, 412 bp, Lilium asiatic
  Clone ID: LIB3229-015-P1-K1-G1
gatggatgatatataccgaaaccctggtccacttcagttcgaagggcctggtgctgatgctaagagtattacgttgtgtgttgaagatcaggattacatggggcgaattaagttgctccaggaatacctggataaggtgaagaacattgtaaagccaggatgttcgcaggaggttctgaaagcagctctgagttccatggcttcggtgaccgatgtgctcactttattgtcttcttcttcgtttagtggccaggggcctctatgagcttcgcttcgaccattttcatttgtcgactatttgtttctcgccaactttgtttagaactgcgagattgggtgtttatgtgattcagttggggatctgatgttttcggtcataccgttgtgagtttcgttgatgcatttttgagtt

SEQ ID NO: 701 - DNA, 298 bp, Lilium asiatic
  Clone ID: LIB3229-015-P1-K1-G10
cccacgcgtccggagacatgggcctaaggatcaatggccaccgaagttcgccgaggagccgagtgagagcgctactactttattttttgccagcacctagctttcagcaagaagggagccggtgccttagcgcaagcactaagtcagcctcactccttccacacggagacctacctatagtgacgtcaaagccaggtgcttggacgaggtcgagggctccggcggcaagaaggcgagccgtccggtggtcacactgacgcttcaaaagggctgcgctaaggcgcaaggctagactccg

SEQ ID NO: 702 - DNA, 347 bp, Lilium asiatic
  Clone ID: LIB3229-015-P1-K1-G12
gaaaaacatcagtctgatggagagagcacgaaagagtgtcgacaggctggacaggattagagatggttagattttctatctgtgatgtaaatttcttacaagggcttggttatgtggggatatcatttgtgcatttatttatgttcaacagagtgggatttactttgggaagttaattacaatggccggtaaccaaatgagtttaggtgttgacaaattggattttgttgatcggttgatggatttattgtacgtttgatgtcgtagtgtttcttactctagctacagtagctagaaatttgtgccaaaaaaaaaaaaaattaataaataaaaataataaaatatat

SEQ ID NO: 703 - DNA, 413 bp, Lilium asiatic
  Clone ID: LIB3229-015-P1-K1-G2
cggacgcgtgggctaccctccacctggtgctccgtctcaggggaggcatgcaaatctttgttaagacgcttactggtaaaacaatcaccctggaggtggagagctccgatacaattgataatgtgaaagctaagatccaggataaggaagggatccctcctgaccagcagaggcttatctttgctgggaagcagctggaggatggtcgcacacttgctgattacaatattcagaaggagtcgacactgcacctagtccttcgtctccgtggtggccagtaattccttagtctgatgcttcctttctatgtttgtatggtggattggtctgtttgaactcctatcgtggcagtactctttagttgtgtgcctgtggttgaataagtactttctatctggtggttgaaagtacct

SEQ ID NO: 704 - DNA, 358 bp, Lilium asiatic
  Clone ID: LIB3229-015-P1-K1-G4
gctacgaaaactcaagtttctagacaacaaatttgctcaattttaacaaaccagtgaatgcttattttgactattattccaaatctaaccaaattcatattactatttcttctaagaatgagcagaacttagagaaagcctgttctcatctaattcatggtgcaaaagacaagttgtcgatagcgaagggacctgctaaaattcctactaaacacttttatatcaacacaagaaagtctccatctgcagaacgtacaaataccttctaccgctttgaacttctagtgcacaagagggttatctacctgaccagctacctagatattgtgaagcacaccacctcaataacaattgaacc

SEQ ID NO: 705 - DNA, 83 bp, Lilium asiatic
  Clone ID: LIB3229-015-P1-K1-G5
aaaaaaaaaaaataataaaaaataaaaatttatatacacataattaaaaacataaaggaggggaaaaaaaaacattataatac

SEQ ID NO: 706 - DNA, 114 bp, Lilium asiatic
  Clone ID: LIB3229-015-P1-K1-G6
ccacccatccacacacaatctgcaattttacctgctaaattatcacatgggagggttattatattgtaacaacttatatacattaaaaacacctatacataaaatcttcttatt

SEQ ID NO: 707 - DNA, 411 bp, Lilium asiatic
  Clone ID: LIB3229-015-P1-K1-G8
cccacgcgtccgcggacacctcttttgcagcagtttcatcagctagttgagggacaagaatcaaccagaattctgctggacatatccaatggaagtaaacaaacttctgggaattctggttccggtgttcatcatgggtatgcggacctgaaggatatccttgagacttggagactcagaactcccaatgaatgggataatttatctgtttggtgtgatttactccaatggaggaatgagatgtacaatgttgtaatagatgcatttaaggactatgcttcgataagtcaacaacttgatcatcttgggtacagagacaaagcttggaatgttaataagcttgcccacatagcccgtaaacaaggactctatgatatttgtgtaggaattcttgacaagatgtatggccat

SEQ ID NO: 708 - DNA, 218 bp, Lilium asiatic
  Clone ID: LIB3229-015-P1-K1-G9
gttttctatgtttgggttcttcgtgcaggccattgtgaccgggaaggggccggtggagaatttgtacgaccaccttgcggatccggcgaccaacaatgcgtgggcttatgcaaccaacttcgttcccggcaagtgagggtttcatgttcatgtatccatgtatgtgttgtaactttgatttgggtttgtgatttgaaatgtttatgaaggaacttgct

SEQ ID NO: 709 - DNA, 413 bp, Lilium asiatic
  unsure (1)..(413): unsure at all n locations
  Clone ID: LIB3229-015-P1-K1-H1
cccgccccgaacttctctctcaacaccttcaccactccccttcccaatggccggacgaggaaaggcaatcggcggccgggccgcctcagcagcggcgaagaagagtcattccaggagcagcaaggcggggctccagttccctgtgggccgcatcgcgcgcttcctcaaggccggcaagtacgcggaccgcgtcggcgccggggctccggtgtacctggcggcggtcctggagtacctcgccgctgaggtgctggagctggcggngaatgcggctcgggacaacaagaagactcggatcgtgccgaggcatgtgcagctggcggttcggaatgatgaggagctgatgaaactgctggggaaagtcacaattgctaatggcggngtgctccccaatattcataatctctctaccg

SEQ ID NO: 710 - DNA, 398 bp, Lilium asiatic
  Clone ID: LIB3229-015-P1-K1-H10
cccacgcgtccgtgatgctgagaaggcaccctaccaggccaaatctgagaagcggaagactgagtacaacctgaagatggatgcttacaacaagaagctggacggagatgctgagggtgaggagtcagacaagtccaagtctgaggttcatgatgaggaggatgaggaagggagtggtgagaatggtggtgatgaggctgatgtgtagatagcaggaagaccttcatggcaactcttggtggatgtttttgtctttggtttattttctgtctaaatgtgttggaactatagcaaatagagcttcttagtaaagcttagtgtttgatctttctttggctgatggatcttgctgtacctggctttgcttttctctgcttaatggataccggtgctgcctt

SEQ ID NO: 711 - DNA, 217 bp, Lilium asiatic
  Clone ID: LIB3229-015-P1-K1-H11
gctacccaaccacacactagctccaattttacatcctcaaatatcacatgcactgtgctttctaaagtttctactaataccaataaaccatacttcaacccacaaccttattattctctcaccaataacgttccacaactacgtgacttttaacttaattacccttataacaaattctctttatcacaattaatctcctaacaaaaaatctcccatc

SEQ ID NO: 712 - DNA, 99 bp, Lilium asiatic
  Clone ID: LIB3229-015-P1-K1-H2
gccacccgaccttatgcaagctgcaggtctacgtaccccattatcacccacaaggggcggtgtattgatacaactaataccgagcaaccgaacttcaat

SEQ ID NO: 713 - DNA, 293 bp, Lilium asiatic
  Clone ID: LIB3229-015-P1-K1-H8
tctagccgtccgcacgcaagctgcgggtctacatgcgccaatatgagacggggggggttgtctattgaggcaccttatacaaatataccgaacttcaatatacagactgatgactgaaagaatccaaaggcgggcaaaatcttcgtgacttttaacttcttacgctaacgacaaattctcgtatgcacaatagttctccaaaactaaaatctttcagttttatgcacttacatcaacctgcataaggatttcgtagattattcaagttatgtctagaggttttaattttacta

SEQ ID NO: 714 - DNA, 413 bp, Lilium asiatic
  Clone ID: LIB3229-015-P1-K1-H9
caggctttcagacgtagatgtgggtattgatatgggtactagggttgcgattgttgggcctaatggtgcggggaaatccactctactcaatttgcttgctggggacttggtgccaaccgaaggagaggttcgccggagccagaagctgcggattgggcgatactctcagcattttgtggatttacttaccatggaagagaatcctgttcagtacatactccgccttcaccccgaccaggagggtcttagcaagcaagaggctgttcgtgccaagctcgggaagtttgggcttccgagccacaaccatcttacgcccatagcgaagctatctgggggtcagaaggcccgtgttgtctttacctcgatatcattgtctaagcctcatattctgttactggatgagcctacaaatc

SEQ ID NO: 715 - DNA, 434 bp, Lilium asiatic
  Clone ID: LIB3229-016-P1-K1-A1
gagatttttcgcctccatccagcagttccagttctagtccctagagaatcaatggaacatgtttcgatcgacggctatgacattccagccaagactcggatctttgtgaatgcctgggccattgggagggatcctgagtcatgggagaatccagagttgttcaacccggacaggttcattgggagctccattgatttcagggggcaacactatgagctgataccctttggggctggaaggagagggtgccccggtatcacatttagtgtagcgagcgtcgaacttgcgctggcacagttactccacagcttcgattgggagcttccggccggtgtccgagcagaagatctggatatgactgaggtgtttgggatcagtatgcatagaaagcagaaattagtggtcgttgccaaaccacatttcagttcatatgc

SEQ ID NO: 716 - DNA, 341 bp, Lilium asiatic
  unsure (1)..(341): unsure at all n locations
  Clone ID: LIB3229-016-P1-K1-A10
cggacgcgtggggcgagggtcgaagatgtggcaaagccggagaatccgttcaacaagaggagaaggctgttgatggcatgcaagaactcatggtccaagagagcaaaatcttatagctctctcctaccgccgctgcctcctcttacggcggagggagacgaggatgatgacgatgacgatgaggataggggggcggtgtgcggcggnaggcccccgcgaattccagacctgcatgaaaggaaggaggagagggaggtcaagagggaataagatctgctagggccttcttcctcactggtctgcaccgggttaagttttttactagtccggttttttttttt

SEQ ID NO: 717 - DNA, 159 bp, Lilium asiatic
  Clone ID: LIB3229-016-P1-K1-A11
cctacgcgtggggcgagggtcgaagatgtggcatacccggataatcccttcaacgggatgagaaggctgtctatggcattgcaagaactcatggtccaagagagcaaaatcttatagctctctcctaccggcggtgtctcctcttacagtggaaggaga

SEQ ID NO: 718 - DNA, 263 bp, Lilium asiatic
  Clone ID: LIB3229-016-P1-K1-A12
cccacgcgtccgcggacgcgtgggcaaaccctcccactcccccgccgcctcctcctccgaccggcgaggctgacggccatggcgtccgaggacccgcgcatcgccaagatcgcctccaccatccgcgtcatccccgacttccccaagccggggatcatgtttcaggatatcaccactatgcttcttgatccgaaggcgttccaggatactattgatttgtttgttgagagatataaagggaaagggatcactgttgttgcagg

SEQ ID NO: 719 - DNA, 421 bp, Lilium asiatic
  Clone ID: LIB3229-016-P1-K1-A2
gacagatttgagtcctcaagattccacactcctatctgatatagtcgaagtcgggacactaccaagttttatacaagaagatgaacaaataagatactcattttacatcttgactagtcatggattgcggtacgagtgctcaagtatttccaaaatacaggcatgacgtgagattcatattctgcccttacctttttcaccatatgaatttcaatgtgggagactccaattttatttatttgatagtggttcaagtgtgggttttatgtggtcactaaccattatgtattcgtctgcaatgaagtgagcagattaaaggcgtgcatggtgatgaatattattgttagatgttacataattaggtcataagtatgtaagtttggtagtgtgtctctgagattgtcagtacgctgatgtggtt

SEQ ID NO: 720 - DNA, 273 bp, Lilium asiatic
  Clone ID: LIB3229-016-P1-K1-A3
gggtggtggcggtgggtacggtggtggtcgtcgtgaaggtggtggcggcggcggatggaattaagggttgattctcccacggtgttgcacgcgggtcctgtccgtgttgcctttatcagtctatggttatgcagttacttcgttgttctctggtttggttaagttggtctctggttcggttactgagtttagattcgttctgtgaacggcaaaaattatatggtgtggtttttgatctgatctaatacattttggattccccgcttcgtcgct

SEQ ID NO: 721 - DNA, 139 bp, Lilium asiatic
  Clone ID: LIB3229-016-P1-K1-A4
ctgtgttggcactctgttccctggtggtcgacgtgaaagtggtggcggccgcgggtggaattaaaggttgattctcccacggtgttgcacgcgggtcctgttcgtgttgcctttattagtctatggttattcagttact

SEQ ID NO: 722 - DNA, 206 bp, Lilium asiatic
  Clone ID: LIB3229-016-P1-K1-A5
cagcaaaccaaattcctcagctcgagagatatggtgaccggcggtaagtcgaagaagggcaccggtggccggattggcggcggtccaaggaagaaggccgtctctcgctcagtgagagccggcctccagttccccgtcggtcgtatcggacgttaccttaagaagggtcgctacgcccagcgcatcggcaccggtgcccccgttta

SEQ ID NO: 723 - DNA, 104 bp, Lilium asiatic
  Clone ID: LIB3229-016-P1-K1-A6
ccacgcgtacgtggacacttggcgagcgttctagaaccatccaagcttacaagcgcgtgcatgctgcgcgaattgtcttctatacagggaagtagatccaattt

SEQ ID NO: 724 - DNA, 374 bp, Lilium asiatic
  Clone ID: LIB3229-016-P1-K1-A7
cacgcgtccgtgtacgcttgcacgcctccgcagtcgaaaagtgttatctttgtaggtatagacggggggtacctttgcaccaattgggagctgtctactgacccttgaagcctgaaagggaaaactagcaaacgagtacattttgtgaagaaccttaataagaaggtttctaagctggctccttactagaagaggataactgagctcttgaaggttggaaaggacaagcgtgctctgaaagtggcaaagagaaaattgcgtacacacaaaaggtggtagaagaagagagaggaaatggtcaatgttcatagaaagatgaggtacgatggagtgtttgagaaaaagaagtgataaatctcagtctgtatttcaag

SEQ ID NO: 725 - DNA, 433 bp, Lilium asiatic
  Clone ID: LIB3229-016-P1-K1-A8
cccacgcgtccgcggacgcgtccgcccacgcgtccgctccgttcgaagcaaagcagcgatgtcgggtcgaggcaagggcgggaaggggctgggcaagggcggcgccaagcgccaccgcaaggtcctccgggacaacatccagggcatcaccaagccggcgatccgccgcctcgctcgccgcggcggtgtgaagaggatcagtgggctcatctacgaggagacccgcggggtgctcaagatctttcttgagaatgtcatccgcgatgctgtcacctacaccgagcacgcccgccgcaagacggtgacggcgatggatgttgtgtacgcactcaagcgccaggggcgaactctgtacggcttcggcggctgatgggtttggtcttctgcaagctttagtggtgctggtgtctattttcttttgctgccgactggt

SEQ ID NO: 726 - DNA, 335 bp, Lilium asiatic
  Clone ID: LIB3229-016-P1-K1-A9
cccacgcgtccgcggacgcgtccgcccacgcgtccgctccgttcgaagcaaagcagcgatgtcgggtcgaggcaagggcggtaaggggctgggcaagggcggcgccaagcgccaccgcaaggtcctccgggacaacatccagggcatcaccaagccggcgatccgccgcctcgctcgccgcggcggtgtgaagaggatcagtgggctcatctactaggagactccgggggtgctcaagatctttcttgagaatgtcattcgcgatgctgtcacctacaccgagcacgcccgccgcaagacggtgacggcgatggatgttgtgtacgcacttaagc

SEQ ID NO: 727 - DNA, 405 bp, Lilium asiatic
  Clone ID: LIB3229-016-P1-K1-B1
agtcgacccaactgcgaacattttcttccatgatgcgtggaagattcagctagagctaacgaacggattggcgagtgaggacattatggtgaggaatattgttaaagagatgcacgagaagtttgacaagtattggaaagactgtagcctggtcctcgcggttgctgtggttatggacccgcgattcaagatgaagctcgtggagttcagtttcacgaaaatatatggtgacgacgatgcccctaggtacataaaggtggtgaacgacgtgatacatgagctctttttcgagtacgtgtcccagccacttccattgacggagagcagcatatacggagctactgaaggcaacaaggtgaccattcatctaccgatggaggacgggctttcggattttgacaagta

SEQ ID NO: 728 - DNA, 138 bp, Lilium asiatic
  Clone ID: LIB3229-016-P1-K1-B10
gcgaccttgtgacaggcccctctagagcctacatccggatgtatataagattgggggcatttaaactgtgcctgttgtgcccgtaaagacaggcattatccagcctgtcatgactgttacatttggtactacctggtt

SEQ ID NO: 729 - DNA, 236 bp, Lilium asiatic
  Clone ID: LIB3229-016-P1-K1-B11
cgcagataatgaaggtgaagaagaagagtgattgttcttttgctcgtatttgagctgatctttgaaaagaattatcctatttcaaaatgtttgaatttttgctaagttatgtagttgggaggatttgtagtttttggtcagcatctatctggaaccgtgatcttgtttgctacttggtttgtttgaaaagtctgctctattggtcaatcatgctaccagcagcatttaagagtctc

SEQ ID NO: 730 - DNA, 335 bp, Lilium asiatic
  Clone ID: LIB3229-016-P1-K1-B2
agaagaccttggctgatcagttcgaagcgaagagggcaaagagcaaggcaagcagggaaaggaagcatgctaggagagaggagcggttggcccagggtccaagcgcatctgtagctcctgcagcaccacctgtggcccaacctgccgaggctcccaagaaaaccaagaagtgaaaatcaaatttgtgccaagtattagtcttcaaactttattattgtctttttattccagtttttcagaaacaattaagatgtctctgtttattggagctgtaactctggcaatgttcaatggtggcacaatttggttaatatgggttatgcgatttccttata

SEQ ID NO: 731 - DNA, 181 bp, Lilium asiatic
  Clone ID: LIB3229-016-P1-K1-B3
atacaaccttttaaaatgttttattggtatcaatttctcaaaacccagtagagagatccaaatcacactgagctttgagaaattgataccaatacaaccttttaaaatgttttgaactatataataactgtggttggagcacattgaaggctcgatgctgaacatgaacgaaattttagct

SEQ ID NO: 732 - DNA, 306 bp, Lilium asiatic
  Clone ID: LIB3229-016-P1-K1-B5
ccccaaccagctcggaatcccggggggcctgccatggattccttgcattctcacacctccgagatcatcggcgtcgccgtcgccgtcgtttccgtcgccgccggcgtcgcttatctctatatcagcaagaaaccaaaggcctgcttggatccggaggaattccgggagttcaagctcgtagatcggaagcagcttagccacaatgttgctaagtttaagttcgcgctgccgacgccggattacgtgctggggctaccgatcgggcagcacatcagctgcaggggaaagggatagccttggcgatga

SEQ ID NO: 733 - DNA, 395 bp, Lilium asiatic
  Clone ID: LIB3229-016-P1-K1-B6
gaaaatgatgaggatagtgattgggaagaggtttcgcaaggtgacagcgacattcctcaagaggttatatattcagcgaaggttccttccaatgctcgcccttcagtcgaacatcttgatgctttggcaaaagtatttaacgagaccgaggatgttgatgatgatgaagatcttatgaaatctgatccactcaatgagatcaagttggccagagtttctgaggaacttctttgtagatctatcaaatagtgacaaacaactcttcgattatctttgtcagggtttaacaagcgttcagaggagggcggtagaaaaagtcatcagtgggtgaaagcaatttgaggaatgcagtgtgttgctctcctattaaattttttttacctgataaattttat

SEQ ID NO: 734 - DNA, 328 bp, Lilium asiatic
  Clone ID: LIB3229-016-P1-K1-B7
gacccatctgtagtgtgctgccccgaggtggaagggctgaccgacataagtgccgctctatgcttgagcaccgccatcaagctcagcgctctcaacctcaaggccaccctccctatcgcgctcgaggtcctcgtaacctgtgggaaaacaccggcggaaggtttcaattgctcttaggtaaagtcattttccatagccctcgcatcaaagtttgtatctccctcgcctgtaaacaactcgaatgactgtgtttgtgcaggcaacagtgtgaaggtgtactcagtggctagaacatgatgggatgtccatgccacggatctttattttc

SEQ ID NO: 735 - DNA, 358 bp, Lilium asiatic
  unsure (1)..(358): unsure at all n locations
  Clone ID: LIB3229-016-P1-K1-C12
gagatcatctggtgtcgtcagagaaattgctgcaaaaatgatacctctattggaagacactttaattattgataattaaagttttggagttgtgtcgtcggaggaaattgctgcaaaaatgatacctctctaataagctaaggtgattgtgttctttgctcattaggtgttgtcagaggaaattgctgcaaaaatgatacctctattggaagacactttaattattgataattaaagttttggagttgtgtcgtcggaggaaattgctgcaaaaatgatacctctattggaagacactntaattattgataattaaagtttttgagttgtaagtgaacattgtcattcacaagctatt

SEQ ID NO: 736 - DNA, 381 bp, Lilium asiatic
  Clone ID: LIB3229-016-P1-K1-C2
cggcgagatgggaggatcgcggcgaaagtacaagaagggcaaggcgaaggtccgcgtcggtctaccgaagaagaagcccggcgtcttcaagcccgccgtcgacattcctccagccctcgccgcctccgccgccgccgctggggaggagtgggacgacaagggcagcgtccccagcaactaccgctccttcggcgtcgtcgccaatcccaacatcctcagcgtccgcgcccgtaccccccacatcgtccagatctcggacctccaggtccccagtcgcgaagttctgcccgtggacgagttcgatcccatcgatagcggcagtgacctcgaatccgacgatttgaaacatgtacttggaaagagacggagggatgggaaaaa

SEQ ID NO: 737 - DNA, 323 bp, Lilium asiatic
  Clone ID: LIB3229-016-P1-K1-C3
attggtcgctgtcagaaatgagtcgcttcttggtgagctaaaagaagctttggcagatgctgattacaagccaattatcatacctggggaggaaggtgttgtcgaggttgctcggcacccagatgctgtcacggtggttacaggaatagttgggtgtgccggcttgaagcctaccgtagctgctattgaagcgggaaaagatatagccctagcaaacaaggagaccctgattgctggaggtccctttgtgcttccccttgctcacaagcacaatgtgaaaattctcccagccgattcagaacattctgccatattccagtgta

SEQ ID NO: 738 - DNA, 345 bp, Lilium asiatic
  Clone ID: LIB3229-016-P1-K1-C4
ctgcagttgccaccatcaagacgaagcgaaccatccagtttgttgactggtgcccaaccggcttcaagtgtggcatcaactatcagccaccgactgttgttcctggtggtgatcttgcgaaggtgcagagagctgtttgcatgatctcaaactccaccagtgtggctgaagtgttctctcgcattgatcataagttcgatctgatgtatgccaagcgtgcctttgtgcactggtatgttggtgagggtatggtagagggtgagttcttctgaggcccgtgaggatcttgctgcgctggagaaggactatgcagaaattggggcaaactctgtcgagggagaggat

SEQ ID NO: 739 - DNA, 441 bp, Lilium asiatic
  unsure (1)..(441): unsure at all n locations
  Clone ID: LIB3229-016-P1-K1-C5
gcgggtgaacgactggctcgacgccgtcggcagcggtggcgactccgctgccggagtcccggcagagacggtggagcggcttcggaagaagatctatgaatatttgttgacgcacgtggagtcagccgccgtcgcgcttggcggtggcggcgggaagactgcggctccggccagtgccgccgctggtggcggcggagagcggcagggtcggaaagggtaattttggggatctgggcgggcacgaatcttaaaagaggataagggtaaaagggtaattttgatgagcaacaattgattgtatatataaacatttttcttttgttcaaatttgggaaatggtaaaagttttggaggttaactattggcactattttaatttttaggtggcaattaaattttttttnttttcaagaaatcggaggtttttttgttatatgggtt

SEQ ID NO: 740 - DNA, 384 bp, Lilium asiatic
  Clone ID: LIB3229-016-P1-K1-C6
gcggcggccaagggtttcttcagctagtttcttcgcatcactgcccgatcgctcgccaagatgcagaatgaagaggggcagatgatggatttgtacattccgaggaaatgttcggcgacaaataggctgataaccgccaaggatcatgcggcggtccagatcaacatcgggcatctggatgagagcggcgtgtataccggccagtttactacgttcgcgctctgcggattcattcgtgctcagggtgatgccgacggtgctctggacaggctgtggcagaagaagaaagttgaagccaaacaataggagacatgcaagtctctaatgttgaagagttaaaactctgaggttgtttattatggatttagtcttgcaattactttt

SEQ ID NO: 741 - DNA, 391 bp, Lilium asiatic
  Clone ID: LIB3229-016-P1-K1-C7
gcggcggacaagggttttttcagctagtttctgtgcattactgtccgatcgctcggcaagatgcaaaatgaagagggtcatatgataggatttgttcattcctaggaaatgctccgcgacaaataggctgataaccgccaaggattatgcggcggtccatatcaacatcgggcatctggatgagagcggcgtgtataccagccagtttactacattcgcgctctgcggatttcattcgtgctcaagatgattccttctgtgctttggacaggcttgtggtgaagaagaaagttttattcaaacaatatgaaacatgcaagtttttaatgttgaaaaagtttaaacctttagggttgtctattactggatttatgtttgtgatttacttttt

SEQ ID NO: 742 - DNA, 78 bp, Lilium asiatic
  Clone ID: LIB3229-016-P1-K1-C9
gctagccgtccctacagaggctgcaagcttacgtacgcaatcatcagatgggggggcttttctaaaggggcaacttat

SEQ ID NO: 743 - DNA, 274 bp, Lilium asiatic
  Clone ID: LIB3229-016-P1-K1-D1
gacttgaagaagagaccaacaccagaggagactaatcatgcacttgttaatgatgacgccttatcatcgaagaagagaccagcaccaaaagaggcagagaatgagatgaaagatacgaaaaggcaatgcttgcagccatgtgaccatgttaaggaagtcaaaaaattgaggaaagagctccgcaagagggaggaggaaatatctagtatgcaaaagatcctatccgcccttacaaggaagcatggattatgatacacattacactgtcgtgagg

SEQ ID NO: 744 - DNA, 320 bp, Lilium asiatic
  Clone ID: LIB3229-016-P1-K1-D10
atcccaccctcctctcccggcggctccgatttccaaccctcatcagatacaatgaaggtcattgctgcctacctcctggctttacttggtggaaactctagcccgtcaagcaaggatatcaagcatattcttggttcagttggtgctgatgctgaagatgagcggattgagtttttgcttgctgaagttaaaggcaaggatataactgagttgattgcttctggaagagagaaatttgcatctgttccatctggtggtggtggtgtggctgttgcagtgtcggcaggtggtggtggtgcagctgcccctgcagcaacagc

SEQ ID NO: 745 - DNA, 218 bp, Lilium asiatic
  Clone ID: LIB3229-016-P1-K1-D11
cccacgcgtccgcccacgcgtccgcccacgcgtccgcccacgcgtccggcctgttaacatcgtagtgttcggaagtagtcttcatctacctctgtatctgtccaagaacttgaatacctctgtatttgtacgagaacttgaattgaggtactactagagtttgaagaacttgtatgttattgtgaataacatgatagaataagagatattttgtgagt

SEQ ID NO: 746 - DNA, 392 bp, Lilium asiatic
  Clone ID: LIB3229-016-P1-K1-D12
ctcctctcccggcggctccgacctccaaccctcatcagatacaatgaaggtcattgctgcctacctcctggctttacttggtggtaactctagcccgtcaagcaaggatatcaagcatattcttggatcagttggtgctgaggctgaagatgagcggattgagtttttgcttgctgaagttaaaggcaaggatataactgagttgattgcttctggaagagagaaatttgcatctgttccatctggtggtggtggtgtggctgtggcagtgtcggcaggtggtggtggtggtgcagctgcccctgcagcagctgctgctgagccgaagaaagaagagaaggtggagggaaaagaaagaatctgattgatgattattggttttagcttggttg

SEQ ID NO: 747 - DNA, 272 bp, Lilium asiatic
  Clone ID: LIB3229-016-P1-K1-D2
atggcccgtaccaagcaaaccgctcgcaagtccaccggtggcagggcccctcgcaagcagctcgccacaaaggctgcgaggaagtcggcgccaaccactggcggcgtgaagaagccgcaccgctaccgtcccggcaccgtcgccctccgtgagatccgtaagtaccagaagagtacggagctgctgatccgaaagctgccgttccagcgtctggtgagggagatcgcgcaggacttcaagacggatctccgtttccagagccatgccgtgct

SEQ ID NO: 748 - DNA, 276 bp, Lilium asiatic
  Clone ID: LIB3229-016-P1-K1-D3
atgagtttgataagatgtctgaaaatgcacgcagcatgttgcatgaggttatggagcaacaaactgtttcaattgcaaaggccgggattattgcttctttgaatgccaggacttctgttctagcttgtgcaaacccaagtggatctcgttacaaccctcgactctctgtgattgataatatccacctgcctccaacattactttctaggtttgatctgatttaccttattctggacaaggctgatgaacaatcagacaggcgcctggctaaacata

SEQ ID NO: 749 - DNA, 87 bp, Lilium asiatic
  unsure (1)..(87): unsure at all n locations
  Clone ID: LIB3229-016-P1-K1-D4
ctcgagtacctngctgctgaggtgctggagctggctggcaatgctgccaaggacaacaagaagtctcggatcaatcccgagggcacg

SEQ ID NO: 750 - DNA, 206 bp, Lilium asiatic
  Clone ID: LIB3229-016-P1-K1-D6
gactcggttggcgggtgtcccgcagtgtgctgtgttgtggctggtggctcggaggggcattggaggagccagctgtctcagggctggtgccggcagcggctatggcggtggtgcaagtggcggcttactaccatgagtagcgtgttggtttagtacacgcgagtaatgcatgcatgcagtaggtagctgcaagggtcgtggttgtt

SEQ ID NO: 751 - DNA, 119 bp, Lilium asiatic
  Clone ID: LIB3229-016-P1-K1-D7
cccacgcgtccgggaggatacaacggtggcggcagcggtggtcgcagtggcggtagaaacggtggaggtggtggtgggtactgtggtggctgctttggtgggttcggtggtgtcattgg

SEQ ID NO: 752 - DNA, 289 bp, Lilium asiatic
  Clone ID: LIB3229-016-P1-K1-D8
ccgataactgggatgattctaaatggaaaggcggtctgttgtatgcacatgggacggttcgatgaagcagaatctcttttgcttgatgctctgaacaaggatacgaaggacgccgaaactctggccaatctaattgtctgcaatcttcatattggcaaatcttcatcacggtaccttagccagttgaagctgtcgcaccctaaccacatactggtcaagcgagcatcttctgctgaggagagttttgacagagctgtacaaggtgttgcatgattgatggagcatgttt

SEQ ID NO: 753 - DNA, 208 bp, Lilium asiatic
  Clone ID: LIB3229-016-P1-K1-D9
cccacgcgtccgaaaaaaaaaaataaaaaaaaaaaaaaaaaaaataaaaaaaaaaaaaaaaaaaaaccaaaaaaaaaaaatcaaaaaaaaaaaaaaaaaaaaaaataaaaaaaaaaaaaaaaaataaaaaaaaaaataataaaaaggggggggcctttttagaggatcaaagttaacttacgcgtgcttgcaaggtaatagttttttt

SEQ ID NO: 754 - DNA, 340 bp, Lilium asiatic
  Clone ID: LIB3229-016-P1-K1-E11
ggaattgaattgcttcttcgactggatcactggatctatgcttcacacattcatctccaatctcaaagagtgcctgatgctagagaaactttacattaagttaagttatgaatctcggtctcgtgtcaaagatactataaaaaagtcctactgcaagactcaggctgctatcgatgacttcattcttccaaagaatgtttttcttaagattgtggaagataattttgaggatgacggattcgaatttcctgaacatttcttgcagctaacacttccgttgcaccatcttagaacggtgacactggaagagttcgttggctctaagtattgaatgtttttg

SEQ ID NO: 755 - DNA, 216 bp, Lilium asiatic
  Clone ID: LIB3229-016-P1-K1-E12
ctttctagtaatttaatgttttagaaggcatgtgtatgaatttcattatgatgaatgagtgacctctaccaattctacaactatgaggaaaagacatgagcatatccgtgctttttcatttataagttatgttatcttataaatgacgcaactctcttcttatcagcaatattgatgtttctgcttttatttatgtgataagtcccagcttaatgc

SEQ ID NO: 756 - DNA, 73 bp, Lilium asiatic
  unsure (1)..(73): unsure at all n locations
  Clone ID: LIB3229-016-P1-K1-E2
cccacgcgtncgcttggactgatgaatttactgngttttgnttcttgctttatctggtacttggtttttagct

SEQ ID NO: 757 - DNA, 160 bp, Lilium asiatic
  Clone ID: LIB3229-016-P1-K1-E4
ccgacgcgtgcgtttggaggcggcacatttatgtgtgctattaatacatgcgcgtgcgagttgagatgtagatgtgctatagagacaggtgagctgagctaaataaatgggttgcgacgagatactttgttcggtaaagataccgggaaattatttaact

SEQ ID NO: 758 - DNA, 320 bp, Lilium asiatic
  unsure (1)..(320): unsure at all n locations
  Clone ID: LIB3229-016-P1-K1-E5
ccaaagtttaaccaaagaagctgtaaagtcttgtatcctgcttctatgaaggccggcaaagatattgaggaaggcctgtcagatcgnggatttgaagttacaagactgaatacatacaacactgttgctgtggaagatgttgaccaaatggttttaagacaagcactttcagctccagttgttgcagtagcatctncttctgcaatccgtgcttggattaatcttatttcaaagtctgaggattgggagaactctgttgcttgtattggtgagacaactgcttctgctgcgaggagattaggctntgagaacatatacta

SEQ ID NO: 759 - DNA, 331 bp, Lilium asiatic
  Clone ID: LIB3229-016-P1-K1-E6
ggaactgaaggttttgcacactcagagaatccgattcaattgtttagtaactttagttattgattgcagatatggcaatggggcttggacaagtgatcaaagaaaacagtataatctggtcgatgccctcaccagatacaccgttcaggtatctttgatggcggacttctatgttgatttacttcactcagtaaattttatgggtggcttacctttattttcaaattggttcaggtttatccgaacagctggtccgcaattttggtgtccatggataaccaagggatgtggaacttgaggtcttgaatgtgggcaaggcagtatctggggc

SEQ ID NO: 760 - DNA, 192 bp, Lilium asiatic
  Clone ID: LIB3229-016-P1-K1-E7
cgcacgggagaacttgctatattgctgttttcaaaggacatattgaattagatacggtatagtttgctaacgtggctactgggcatgccctagatatcattgcacgcatgctattgtggaaggatggcttagattaccgacacggcacggatcatagattgggatcttatatgcatgttaacgaaagtccat

SEQ ID NO: 761 - DNA, 146 bp, Lilium asiatic
  Clone ID: LIB3229-016-P1-K1-F10
cccacgcgtacgtacgcgagctgccgatttagatgctccaatcttacatgcgcgggcctgtgaagagatacattttatatagagccacaataaattcaatttactagctcgttgatgacaacttattgtcagagaaaaccctggag

SEQ ID NO: 762 - DNA, 325 bp, Lilium asiatic
  Clone ID: LIB3229-016-P1-K1-F12
cccacgcgtccggcgaagaaggacttcaacttggagaagcaccccgacatcgaggttccgaatctccaggtgataaaattgatgcagagcttcaagtcaaaggagtacgtgagggagaccttcgcgtggatgtactattactggtaccttaccaacgacggcatcgagttcctccgcacgtacctcaatttgccgtctgagattgtgccagctacgctgaagaagtcggcgaagccgccttctcgtccgtttggagctgggccgcctggtgaccgcccgagggggccgccgcggtttgagggtgataggcccgggtttggagata

SEQ ID NO: 763 - DNA, 398 bp, Lilium asiatic
  Clone ID: LIB3229-016-P1-K1-F3
cccacgcgtccgaatatctcttcagagaatagaaagaagctctctgttctctttccatctccttcttcaccatgaagtgctgtgcaggacaaacagaagggtgtgggaatcccaattgcagctgtggatccagctgcaactgttcagactgcaaatgtggtaaataagggaggacatgaggtaaataagagaggacatgagggtgcaaactggttgcatcatgagctgttgttgttctccatggcctacatggtttgtgttggatttgtgtttgctgtggtcagaagtactttgagtgaagtcttctatggatggtttggttggcgtatgaaccagtaattcttggtttggtaaaaaaataccttttttacacggattctcggtttctcttttttttt

SEQ ID NO: 764 - DNA, 154 bp, Lilium asiatic
  Clone ID: LIB3229-016-P1-K1-F5
gcctgcacgtaccgtccgaatccggtcgaccacgcgtccgccaggtagacctcgtagctaaagtatagaactccggttcacgtacgcggcacataccgatacattgtcttctggcatcttaagcacactctgtcacggtatagcacatcccttg

SEQ ID NO: 765 - DNA, 152 bp, Lilium asiatic
  Clone ID: LIB3229-016-P1-K1-F6
ggttacacgtaactcatagtgtaggaggtggaaggtgtggttctcctaaatgatgaaccagttagtgtaacatacctttttgatatgtaaaagccaatctaactcgatattactcatccattaatctctccttcaattggtggagagaattt

SEQ ID NO: 766 - DNA, 267 bp, Lilium asiatic
  Clone ID: LIB3229-016-P1-K1-F7
ggttacacgtaactcatagtgtaggaggtggaaggtgtggttctcctaaatgatgaaccagttagtgtaacataccttttcgatatgtaaaagccaatctaactcgtaattactcatccattaatttctccttcaattgttgcagagtattttccatggatcgccatgaccacctatatttgatttgcttaacatctttatttaatgtgcttgacattaaataatacttgcaatgatgtgttgtcatttggagtttaaaaatatttt

SEQ ID NO: 767 - DNA, 216 bp, Lilium asiatic
  Clone ID: LIB3229-016-P1-K1-F8
cgcgttctcgtggtctgttattcgcgatactgacacggcgatcaatttaatcggggacggtctcgcgttactcggtgttgcgtactataatcatgtcaagttgcaggcgctgaaggcgaaggagaatcagaagaagccgtctcaggttgatgatgaggagacggtgatgctacttgaggatcggctcatggacggggagccgtacaagaatgatgc

SEQ ID NO: 768 - DNA, 79 bp, Lilium asiatic
  Clone ID: LIB3229-016-P1-K1-F9
cccacgcgtacgttcgtgagctgccgatttagatgctccaatctcacatagcgggggccttctaagagatacattttat

SEQ ID NO: 769 - DNA, 315 bp, Lilium asiatic
  Clone ID: LIB3229-016-P1-K1-G1
tcgacgttcgtgatcgactgcgggaagcccgtggaggacaagataatggacatcgcctcccttgagaagttcctccaggagcggatcaaggtcggcggcggcaaggccggcgcattcggcgacgccgtcacgattacacgtgacaagagcaagatcaccgtcacctccgacggtcccttctccaagagatatttaaaatacttggcgaaaaagtacttgaagaaacataatgtgcgtgattggctgagggtgattgcatcaaacaaggatcgcaatgtgtacgagatgcgatacttcaacattgctgacaatgaa

SEQ ID NO: 770 - DNA, 137 bp, Lilium asiatic
  Clone ID: LIB3229-016-P1-K1-G10
atcttgttatgttgtggatgaacctgttgtctgaatcaatgttgaatgtgtgagaggaaaaaaaataattataaaaaaatctccattcatttctcttcccctcttctctatatcaaccttcctctttttattatttc

SEQ ID NO: 771 - DNA, 311 bp, Lilium asiatic
  Clone ID: LIB3229-016-P1-K1-G12
attgtagtttggaccaacgtatggtggacctcagcctgtttacaatcagcagggtccaccattgccgcctccccaagcatatatgcctcccggtgctcctcctttgtacgcgcagcagatgatgcttgcccagcctcgggccgtttattatatgccaccaccctatctacctggatatccgcctgaaaggccaaaccaaggacgaaacttctagccctgttatctgttgcagagagttggtgttgcgagcatacaattagatggcatcctcctgcccctggaggacataataaaataaacatgttggaaaa

SEQ ID NO: 772 - DNA, 154 bp, Lilium asiatic
  unsure (1)..(154): unsure at all n locations
  Clone ID: LIB3229-016-P1-K1-G2
ncgacgcgtgcgatcgactgcggcaagcctgtagaggacaagataacggacatgggcgttcttgaaaagatccttcaggagcggttcaaggacggcggtggaatggccgtcgcatgtcgcgacgccgtcacgattacacgtgacaagagctaga

SEQ ID NO: 773 - DNA, 349 bp, Lilium asiatic
  unsure (1)..(349): unsure at all n locations
  Clone ID: LIB3229-016-P1-K1-G6
cttttgtgagtatatttgatttacccaatcatctaattttaacatggatcaccgagccaaaaagtggatcaaatagattatcgaataatgaaattaaagaaagtgctctaaagtagtcagacagtggaactgttatgtcaaggttatatacatcctatttagcattgttacgaagctatcataaatctgttcgtatggtgttttatagtgtgttttaagttctatatatcattcatactttgacaacattttgtctctaccgatgatgtaatgaggagtgggtgtaaatcaaagccatcccattagttatgcagtaagccaaaaaaacctncattaccatgcatcggtg

SEQ ID NO: 774 - DNA, 186 bp, Lilium asiatic
  Clone ID: LIB3229-016-P1-K1-G7
cttatgcgtgcgtagccgatctactcaatcatataatattaacatggctcgcgggggtcaaaagtggattatattgatgtctcactaatataattcactatagggctcttaacaactcagacagtggaactattatgtcatggctctatacaatctatttagcaatcataccattcttttataaat

SEQ ID NO: 775 - DNA, 118 bp, Lilium asiatic
  Clone ID: LIB3229-016-P1-K1-G8
ccacgcgtccgcacgcgaaccgcctattaagatgatccaaaccgacatgcgggggtctttgaagagaggcaatcaatttttagacaacgaatatcattatactactcgtataatggac

SEQ ID NO: 776 - DNA, 272 bp, Lilium asiatic
  Clone ID: LIB3229-016-P1-K1-H10
cccacgcgtccgttctcgttcctctgttgtacttgactcaagtcaagtggggaggaaatttatggttatagataactgtatcctaaaactgcagacagtgtattttttgtgatgcttcaggactctgattgctgaaattaaggttatattcattttggttctgcatgaaacaaatgtgatttataaaggtcggtcgcatatagaggatccatgcttacgtacgccagtatgcgacgtcatagatcttgtattgtgttagctaagttcaattt

SEQ ID NO: 777 - DNA, 338 bp, Lilium asiatic
  Clone ID: LIB3229-016-P1-K1-H2
ccacgcgtccgcggacgcgtgggtgcgcttccaacatttaggaaactctatggaaagatagagacggatctcaaggagaatgacactattaccgtgacgctggagaacaactacaacacctatagtttttgtggcaagaagaagttggtgttatcaaccacaagctggctcggagggaagaacgactttcttggtttagcatatctcaaccatcgcggactgtgcttcttcttggaacggccttcactgttggtatttggtaagccaagaaactcggagatcaacgtactgtcatggacagaacccttcggtcacaaatgtgcatatgatcacacgag

SEQ ID NO: 778 - DNA, 272 bp, Lilium asiatic
  Clone ID: LIB3229-016-P1-K1-H3
agggaatccgagtggtttggttgattatcctttgagagatgcaaacccctgagttcaaggcttatcagagtcaggttataaataattgtaaggctcttgcatccaggctgactgagttgggttacacactggtttctggcggaagcgataaccacctagttcttgtggatctgaggccactgggaatcgatggtgctcgggttgagaaaattttagaccttagttcaatcacgctcaacaagaactcagtgccttgtgataaaagcgctcta

SEQ ID NO: 779 - DNA, 344 bp, Lilium asiatic
  Clone ID: LIB3229-016-P1-K1-H4
agggaatccgagtggtttggttgattatccttagagagatgcaaacccctgagggcggggcttatcagagtcaggttataaataattgtaaggctcttgcatccaggctgactgagttgggttacacactggtttctggcggaagcgataaccacctagctcttgtggatctgaggccactgggaatcgatggtgctcgggttgagaaaattttagaccttagctcaatcacgctcaacaagaactcagtgcctggtgataaaagcgctctagttcctggaggcatacctattggaacacctgccatgactactagaggaactaaggaggaggatttcaaactt

SEQ ID NO: 780 - DNA, 352 bp, Lilium asiatic
  Clone ID: LIB3229-016-P1-K1-H5
gtttgtatttaatatgtattatcccctccctccacttaatcctataaatggagttggcataaccttttttatgttagttttttcctcctatatcttcctaaccctaattcctcttcccgtatactctctcacctcccacttatttaaagagactatgggtaaagatgtggaaatgaaggaaatataaaggaggaaaagaaaggaaagaggaggaaagaaagaagagaggaggaaagagagaaaagagagaataaaagagagaaagggaagtagagaagattagagaggaattggagaaaaaacatcacattttctctgacgatctctagtttttttctacggtctctcccca

SEQ ID NO: 781 - DNA, 108 bp, Lilium asiatic
  Clone ID: LIB3229-016-P1-K1-H7
gacatatctgatgtgtattatccccttcctccacttagtcctataaatggaggggtacataaccttttgtatgttagtttatacctactatattttcctaaccctaat

SEQ ID NO: 782 - DNA, 272 bp, Lilium asiatic
  unsure (1)..(272): unsure at all n locations
  Clone ID: LIB3229-016-P1-K1-H8
cccacgcgtccggttcctgtcaggaggacaatccgaaatggaggcaacactgaacttgaatgcgatgaaccaaggtcccaacccatggcacgtttcgttctcgtatgcacgagctctccagaactcggtcctgaaaacatggcagggacgcccggagaaaattgaggcagcacagagatcactcttagagcgcgctagagctaactcccaggcccagcttgggcgatactccgctgcangtgagagtgaagatgcgaaggctggaatgtttc

SEQ ID NO: 783 - DNA, 165 bp, Lilium asiatic
  Clone ID: LIB3229-016-P1-K1-H9
cccacgcgtccgttcttgtttctctcttgtacttttctcaagtaaagtgaagaccaaatttatggttagagttaactgtatcctaaaactgcagacagtgaattttttgtgatgctttggactttgattgctgaaattaagtttatattcattttggttattaat

SEQ ID NO: 784 - DNA, 416 bp, Lilium asiatic
  Clone ID: LIB3229-017-P1-K1-A1
cccacgcgtccgcggacgcgtgggcaaaccctcccactcgcccgccgcctcctcgtccggccggcgaggctgacggccatggcgtccgaggacccgcgcatcgccaagaacggctacaccatccacctcatccccgactccccgaagccgtggatcatgttccagggggtcacccctttccgtcgctgtcagaggagatgatggactaccagcaaaggcagtaggcattatttcattctctccatctccacgagaagaatttgcagaagcagcactgttggaaacttcgtttggttgtgttgagaaaacaagaaattgttgacggccctgagctccagaccttccccgcccttctcttctagcaatatggtgtgccctgcccattgccgcagcagcagccaaatgctgggatatac

SEQ ID NO: 785 - DNA, 247 bp, Lilium asiatic
  Clone ID: LIB3229-017-P1-K1-A11
gacctatatccgcaagcagagcgtgtataaatatgtgctggcacgcccgggcgtgctacttgttaagtgtcactcaggttccatcgcatatagtacactatgagactggtgactaggctctctcttgtaagatcattagctcgctatatctaagttaccgagcacatatccgctttgattcatatagatgtatcgcataaaatccgatctgtgtgttgaatacaatctatgtttgtaatgaccatgc

SEQ ID NO: 786 - DNA, 95 bp, Lilium asiatic
  Clone ID: LIB3229-017-P1-K1-A12
gttctagatccggagccgccgctctattggatccaagcttacatacccgggcgttggacgtgataagtgtctcatagtgtcacccaaattcagtt

SEQ ID NO: 787 - DNA, 428 bp, Lilium asiatic
  Clone ID: LIB3229-017-P1-K1-A2
gaccggtccggcatggccgacccgcgcgatcgcgtcacgcgtcccgtcaatcttcagcaaatacgcattaacgcagcctgatgcattgacatcggatgagatctacacactgcgtacaagtcaatcgcaatcttctcgactttataggatgggtggcaagcattgcagagtggcgacttctttaccagataggaaaggatgaggatggtttactgcacaaagaaactatccgaggggctttcgatggcagtctgtttgagcgactggagaaagatagagcttcacgaacaaagatagtctgaatatatcttcatgatgagatataaatgctggcaagctacaaacatatgtacataaataaatctatattggttatgttattggaataagtgtttatttgtaataaataatcatgtcatgattatatc

SEQ ID NO: 788 - DNA, 429 bp, Lilium asiatic
  Clone ID: LIB3229-017-P1-K1-A3
ctccaatgcctgagtgtcgacggactcacacagacgccctccaagcctcttgttcggcggtgcctccaattcccacaacgcctccaatttccagcgacgccattatattcggcggccctctggcgggtttctcttggctgcgggatttgtgaggatctcatccttagtttttcaggatggagagagaaaaaggtcctgctcatgataaaaggttcgtatgctctgttgtcgtagagacttgttcgaatatatttatctctgtgggtgaagagaaggccaaagtgaaagatgcagagaactcggctgctgccaagatgttattggaattatcgccgaagaacaaacaatgaattcggtcgctggcattcggatgtagatgaacttgcaatgtagtcttatgttgtcttggattttatgtgcccccttaaa

SEQ ID NO: 789 - DNA, 199 bp, Lilium asiatic
  Clone ID: LIB3229-017-P1-K1-A4
cccacgcgtccgagctgtgtggagtggttgttttgtggttggagtggagagttgagagtttgttgattgtgagtgtgtttgtgagttgtgagaggaattgtattgcatctcccctgtgtgacaggcagagcatttgcattgggtttctctgtaagcaacttattccgtattaatgaaatcattatctgtctgagtaaaa

SEQ ID NO: 790 - DNA, 268 bp, Lilium asiatic
  unsure (1)..(268): unsure at all n locations
  Clone ID: LIB3229-017-P1-K1-A5
ccgcccacgccgtccgagctgtggtggagtggttgttttgtgcttggagtggaaagttgagagtgggcttatagttattgtagcccccacttanaagaagaatcctttagattctgccatgagtgacaggcatagcatacgcttcgggtttctctatgatctaatcattacgttttaatgatatcatcagatatctgagcagataaaaataaaatgtccaggggctccgctaatagatgatccaagcttacatacacttgcatgcgac

SEQ ID NO: 791 - DNA, 267 bp, Lilium asiatic
  Clone ID: LIB3229-017-P1-K1-A6
ctccagactgccgcaagcgactctattagacttggcggatttaatatttacctatttatcattctagtttgcattactcatggtctctatttatcttttggtacttatttaagtcatggtcgactgctgctgcgttaataagagaacctagtggtgtgatgtgggatttatgctattttaaggaaccgtagtgttatgtatggattctgaacatcaaattgctacttgtgtttcggctattaactggcaatgcagttattttgtggt

SEQ ID NO: 792 - DNA, 346 bp, Lilium asiatic
  unsure (1)..(346): unsure at all n locations
  Clone ID: LIB3229-017-P1-K1-A7
cggacgcgtgggctgagccaagatagagcagaggagtggattgcccaacagaaatccgatcactggaaataacatgcctgttagtcgcaggagtactaatcccagatggcaaaacatcaacctgctcagcgtgtgctgggtttatttgttggatttcgcgagggatttcctctacggtagctgtgagaggagatgatggactagcagcaaaggcagtaggcattatttcattctctccatctccacgagaagaatttgcagaagcagcactgttggaaacttcgtttggttgtgttgagaaaacaagaaattgttgacggccctgagctccagaccttncccgcct

SEQ ID NO: 793 - DNA, 228 bp, Lilium asiatic
  Clone ID: LIB3229-017-P1-K1-A8
atcgtctagtgtgttgagccaagattcatccgacgagtcgctcgcccatcgggcgtgggctgtctgaccataacatgccacttattccagagatgtctattcttacatggtacaacttgcacctgttcattgactgctgggtttatgaggaggatttcgcgagggatttactctacggaagccaagagagtcgatgcatgactaaaagcaaaggcagtctgcattatt

SEQ ID NO: 794 - DNA, 437 bp, Lilium asiatic
  Clone ID: LIB3229-017-P1-K1-A9
cccacgcgtccgatgtaatcctgtgcttacaactgttccccccttgcaggatctgtatgatggacggcgaggatcgcatgcatgcggagaaggagatcaaggaccagaagatcaagcaccacgatggacggctctgatggatggctctgtagcagaggcgatggatggtcctgatagctggaaggtacaagatgaagtttgatcggatggcgaagaggagggccatgcgagaaggcgctagaagaccgtgtgaagaagactctccattggacgcgcgtatgaggtgcctcgaagcagaagagatgccgggcggaagatcgagcactatgaagaccctgcacctataagagaaggtagagcccgagcgattacttcgtcttccgttcttgattgaaatcccggctcccatacgataccccttgaggattccatggaga

SEQ ID NO: 795 - DNA, 310 bp, Lilium asiatic
  Clone ID: LIB3229-017-P1-K1-B1
gggacgcaccctttttagcttatgcgaatgagagctctagggatgctgcgcgtgaagatggacttaaatgctgctgctctctaggtcaaggcaaagaagaaggtcatgcgaaaatccatcaaggctgacatgcagctgcctgatatgcgcatgacaaggttagcgaagaaggcgccgtatgctaagcgcgttggctctggagctgccggctatcttgcaggcgcccttgattacctcgctgccgtggtactggatctgtcttgcattgctgcacctgacaacaagaagtgccgcatcattcacaggcaca

SEQ ID NO: 796 - DNA, 337 bp, Lilium asiatic
  Clone ID: LIB3229-017-P1-K1-B12
cccacgcgtacgaccacgcgtacgcggacgcgtggatcgggcacacagacgtcggtgaagtcttggacagtgacactgtgcatgatgtgtggcgtacgatgctcgatgtcgtgaggtctactttcactaacgagaatactgcgctatcgcacaccatattttatatgaccactgccttgccgtctgatcgcactatcaatgttggtatcgcagaattcaagaccaaactggtgactaaccctcagaatacagtggatgcactggtgatacgcgactgatatgtgtgctgacaaagcctaccatgagcagctctcagtaccagacatcacatatgcat

SEQ ID NO: 797 - DNA, 349 bp, Lilium asiatic
  Clone ID: LIB3229-017-P1-K1-B2
ggtaaaactgtgcctaaaacagcagaaaatttccgagcactttgtacaggcgagaaaggtgttgggaaaagtggcaaacctcttcattacaaggggagctcattccatagaatcattcctagctttatgctccagggtggcgattttactcttggtgatggaaggggaggagagtcgatatatggtaccaaatttgaggatgagaacttcaagctcaagcacacagggccaggatttctctcgatggcaaacgctggtcgggataccaatggttcacagttcttcatcaccacagtaaccacgagctggctggatggcaaacacgtggtatttggaaaggtaatatctg

SEQ ID NO: 798 - DNA, 295 bp, Lilium asiatic
  Clone ID: LIB3229-017-P1-K1-B3
ggaatggtgagttgtgggatgagccgatggagttcagaccggagaggtttctcgccggcggtgaaggagaaggggtggatctaactgggagcagggagataaagatgatgccttttggggcggggaggaggatttgcccgggtctaggactcgccatgctgcagcttgaatattttgtggctaacctagtaagggagtttgagtggaagcctgtgaagggtgaagaagttgatatggcagagaaactggatttcactgtgtcgatgaagaagccccttcgagctgaaatctcaac

SEQ ID NO: 799 - DNA, 402 bp, Lilium asiatic
  Clone ID: LIB3229-017-P1-K1-B4
ggaatggtgagttgtgggatgagccgatggagttcagaccggagaggtttctcgccggcggtgaaagagaaggggtggatctaactgggagcagggagataaagatgatgccttttggggcggggaggatgatttgcccgggtctaggactcgccatgctgcagcttgaatattttgtggctaacctagtaagggagtttgagtggaagcctgtgaagggtgaagaagctgttatggcagaaaaactggatttcactgtgtctatgaataagccccttctagctgtaatctcaaccaagaagagcaagtttatcggcatttacaatggcatattaaactagtcaaaaccctttggattaaaggtttgaaattaactagttttgatccctgccattacaaggt

SEQ ID NO: 800 - DNA, 198 bp, Lilium asiatic
  Clone ID: LIB3229-017-P1-K1-B5
cccacgcgtccgggaagggtggttgtcaggctgaggtcaaggcctgatgttgtttcttttttgtggatcaggccgtctatatgtgtagggtttagtcgtgcattttgttctgcttgctggtttagtggatggttatgagttgtctttgatgtgttaagttgacttttgaacttattaattgacggttgagttaggaca

SEQ ID NO: 801 - DNA, 191 bp, Lilium asiatic
  unsure (1)..(191): unsure at all n locations
  Clone ID: LIB3229-017-P1-K1-B6
cccacgcctccgggaagggtggttgtcaggctgaggtcaaggcctgatgttgaatcgttggtgtggatcattcctnctatatctctagggattagccgtgcattgtgttctgcttgctggtttagtggatggttatgagttgtctctgatgtgataacttgactttagaacttattaattgtcggttgagt

SEQ ID NO: 802 - DNA, 108 bp, Lilium asiatic
  Clone ID: LIB3229-017-P1-K1-B7
cccacgcgtcctgaaagaatcgttgtttttcacaagtcaccgcctgcaggggggggttttttgtaaattaagccccctatatatactaagattagccttacattccaa

SEQ ID NO: 803 - DNA, 373 bp, Lilium asiatic
  Clone ID: LIB3229-017-P1-K1-B8
caataatgcttttggaaatacaatcagcaaggatttgcacgctgatccgaaggacgagttcctctctgcactgagagcagtcataaaatgtctcctcttccccgagaagtatttcgagaaggttattcgtcttgcaatcaacaagatgggaactgacgagggtgcgcttactcgggttgtgacaacccgcacggaggtcgatatgaaagcgatcaaggatctttacttcaagaggaacaacgtgcctcttgaccatgccattaagaaggatacgaagggagattatgaggacttccttcttgcgttgattggccatgaggaggcttgagatatctcgactgtgaccctgatgctgggtaagttggttctcttc

SEQ ID NO: 804 - DNA, 394 bp, Lilium asiatic
  Clone ID: LIB3229-017-P1-K1-C1
gaagtcctggcggagatcaccataggctcacacattggtaaaatgggagtaatacctttatcggctaagtgactaattgcaaagaaattagagatgaggagacactgggagagctaacaagggcaacatcttcattaaagttaataggaagaaaagcataacaggtggagagatacaactctgtagatgcaaaggacttgattgcattgcctcgtgcaatctgttgggtgagagggtattgatctcgaagacattccataggaatctcggtgattgtttttctcgacttatattgatagtttcaagggacaggcttttgtaaataggtaaaggcatgatcttcttgttgattaatgtggttcagatgtttttagtttggagaggtgcatatttt

SEQ ID NO: 805 - DNA, 434 bp, Lilium asiatic
  Clone ID: LIB3229-017-P1-K1-C10
caccgagtcctcagtttacagaggagaagagatggacgctgccaagacgaccaagggcgctgctgggcggaagggtggtgccaagaagaagtcagtcccgaagtccgtcaaagccggcctccaattccctgtcggccgcatcgcccgctacctcaagaagggtcgctatgcaaagcgtgttgggtctggagctccagtctaccttgctgcggttctcgagtaccttgctgctgaggtgctggaactggccggcaatgctgctaaggataacaagaagtcccggatcatccccaggcatgtgtgtctggctgtgaggaatgaccaggagttggggaagttgcttgctggagtgacgattgcccatgggggtgttattcccaacattaacccagtcctgcttcccaagaagaccgctgagaaggctgattctgctg

SEQ ID NO: 806 - DNA, 339 bp, Lilium asiatic
  Clone ID: LIB3229-017-P1-K1-C12
cccacgcgtccgttctagtcctgcaaatgtgcatcggcaatccttccaagagggggctgcttgtgttgtgctggcgatgcaacgcatactgaatgagtcgaacgatctgcagatggacacaccaacatcttgcacagcacgccctgtacccaactatatgttctactggcaaacaactattatgagacctgctgacagtcccttaactgtagcagtctttttacattactattcacttatcgacatattacccgatcaagccgcccaaagattcatttcagtccaaggttttgcacccatacattaacacctatggaagcatttaccttgacatcctct

SEQ ID NO: 807 - DNA, 284 bp, Lilium asiatic
  Clone ID: LIB3229-017-P1-K1-C2
cggacgcgtgggtggagccaggcctccaagatagagaaatgtatacttttcttggactattgttttttgttattcattttgctcaagagaaatttatgtatttcatggtttcttgttttctttagtctaattccgtttgtacccctctggtgattggatttgcagaaggataatgtcatcaattcatacttgtatgtgaaatatcatcaaactacaatctcgagatattttataacaatatttaaatcagttcaatgaagtgttattttgagagaatttctttc

SEQ ID NO: 808 - DNA, 430 bp, Lilium asiatic
  Clone ID: LIB3229-017-P1-K1-C7
cccacgcgtccgctcagtagctgcagcaccattttcgacctttgccgcggccgggaggtccactctctcctcatctcaaatgggtttgcctccaatatcttcgccatgaccgtcgctgtcaacatgtatgcgaaatgacgccagatggatgatgcccacaagatgttcgacagaatgcccaccagagacctagtcgcatggaacactgttgtctccggatattcacagaacgggcttgctctgcaaaccctcgacaccgttctccgattgcaggcgattgcaggcggacgggaagatgtgtgaggtcctgattcagaaggccaaagatggtggccttgatgttgtggagaagaatatcttctggaacggccatgagccgtcacccggcagttacaactttgaggggagatatgatctggtgagattcatc

SEQ ID NO: 809 - DNA, 330 bp, Lilium asiatic
  Clone ID: LIB3229-017-P1-K1-C8
ccaatccgaccggtcggttaaccttatctacaatgtttgccgccccacagtattgtctaaacttgatctccatcaatgctctctgcttgcttggactgacaactactttctcttccactttgtgttgtgcaggatccgcgcacaggcaggacagttggcgctagttctagacggtggactccgtattacttggactacttgcatgttccttctgctactgtttacactactttcgctcctgtcattgctatgtctaatgccgagctatgtcataaacgcttggctcacctgtaacgtcagaaactccagttactcacccaatccggtgtt

SEQ ID NO: 810 - DNA, 353 bp, Lilium asiatic
  Clone ID: LIB3229-017-P1-K1-D1
gcccatggtaaagtacacacgtctatgttaccgacaagattttgcggggtggagggccgacagtcattaacgactgattatggacaagctcatgccgatatatatggtatcaagttgatatgacaaggaccaagacaaagcgataccaggtgatagggagcttattcatcgatagaaatatgaaccgatgcactccaaccgtagatgctttagctggagagtgtatagtcaatatgactgcacttgatgattttatgggggacatggaatctcgtactaagattctcttgtgtgggaccagaatgtataattattgggtgacattggctatggtatgagcaaccgatctgggc

SEQ ID NO: 811 - DNA, 330 bp, Lilium asiatic
  Clone ID: LIB3229-017-P1-K1-D10
cgcacgcgctggagctaatggaccctccgtaggcgatgatggccccgctcctagtgttgtctcaggatgctcactgatccatgacctgtctgaactgacatcgcacccgccttcagcgtcgcatcctaggatccgccaagaggctccatccccatcatgatgatcgcgcccggatggtgctcacccaatataagcccacgaatgtgcgcgttgctgctgagaagatcccatcttctgcctctcctgtggacactagtcttcgagatggggaatacgatcttgtggcgagtgactcaacttcagtagagcctttccactggacgaagaggg

SEQ ID NO: 812 - DNA, 436 bp, Lilium asiatic
  Clone ID: LIB3229-017-P1-K1-D3
tagagagacaagagtgaaggctatacaggagatatttgccgaagctggttttacagaagtcactaagaatttcttggctgtactggctgataacggaaggcttaaatatcttgaacggatctcaaagagatttgtggaactgacaatggcacataagggggagattaaagttcttgtgaccactgttattcccctccctgaggcagaggaaaaagaacttgtgcaaaccttgggagatatattgggacagaaaactgtaataattgagcagaagattgaccccagtattcttggtggtttggtgattgaattcgggcagaagttgcttgacatgtctataaggacaagggcgaagcagatggagaggtatctgagggagccggtcaatttcgaccagatgtaattgtaggtgattatggatcagaagtttgtttca

SEQ ID NO: 813 - DNA, 433 bp, Lilium asiatic
  Clone ID: LIB3229-017-P1-K1-D4
cccacgcgtccgcagtaacttgcaggtttgaagtgactgacgttccttttcctcatggaacaccaggaattaacatggtcttcgacaatgtctgtgatagcaagattggatcgcttagaccgtatgattctgaacctcgaggagaatcaaagttcatccaggaggtattcctgcagtcttactggttcagtagaacaagctctgtgtgagaagcaaaacaagccgctcgcctgtatccttaaggaggtcgcttccaaaggttctctcatggaaagagtaacaatgttggaggatcgggtgctacagttgagccttgattccggaagattgagctgtcccaacatgttatctgttccggagaacagtaagtgcacttcaccggtaaaagagtcgggagaaagctcggagccttacctaggagaagatggtaaag

SEQ ID NO: 814 - DNA, 432 bp, Lilium asiatic
  Clone ID: LIB3229-017-P1-K1-D5
gcttgcttcaatggcgatctacctccgatccctcgccgccgccgtcctcctcctcggccttgccgccgacgccgagtccatgtccgactcctccgcactggaatccgttgccacgtcggtccacgacgtcctcccccagtacggcctccccaagggcctccttcccaactccgtgaagagttactccctcagcggcaacggcgagttcgagatcgaactctcagccccctgctacgtccagttctccgatctcgtctactatgagcgccacatcaaagggaagctctcttatggctcgatctccgacctgtccggcatcaaggctaagaagctcttcgtctgggtgccgattaccggcatcgtcgcacatccggcagactccaccgtcgttttcgaggttggatttctgacggagtctcttcctgtatcaca

SEQ ID NO: 815 - DNA, 300 bp, Lilium asiatic
  Clone ID: LIB3229-017-P1-K1-D6
cgagactccccatcgccatagcggtgctcatcttcgccatcgccctacctgccgcccaggcccaagctccggctccggcgccgaccagcgacggcacatcgatcgaccagggaatcgcctacgtgctgatgctggtggcgctggtgctgacttacctgattcatccattggatgcatcgtcgccgtacaagttgttctgatatttacattggagtagttgtgaagtttgtgtttgtatctggggtttggttgggttgtaattctgaagtttgtttttagatgatgagaaatttattctgg

SEQ ID NO: 816 - DNA, 386 bp, Lilium asiatic
  Clone ID: LIB3229-017-P1-K1-D7
cgattccttctgagatctcgtcgtcgccggacaggatcgccgatcgagttgatggattatggatgcaaatgctcttcttcgtcgatcgctgcatcctcgcttctattcgatctcgaattcaccgcatcaaagccgaccgatctctcgttcttgatccgatcgacgccgtggttccgcgagctgtggggtgggatttagaacttgctcctcaagggatctcttcttgaaaatctactgaattgtgggataaaacagactacaattttcacattcttctttgtgacagatgcacgatgaccctttctaaaaagcctgtaaattcgaatatgtggcagcctagaggccaatcatctggttgggctgcctttgaccgcaagcagcgagag

SEQ ID NO: 817 - DNA, 213 bp, Lilium asiatic
  Clone ID: LIB3229-017-P1-K1-D8
tgctgctactgcttctaaagagaaggcttaaggtgattttgttcgtgtttctactgctttattggtgttttttttaaagtgagacatttgttgtttgagcttgtttctgtcgttggctttgttgcctgtgatatctttttgttgagaactagattattatgctatgttggttcttttgctcgactaatataatgtccatttatgtgctgcaaa

SEQ ID NO: 818 - DNA, 395 bp, Lilium asiatic
  Clone ID: LIB3229-017-P1-K1-D9
cggacgcgtgggagcgggttgaccctccgtcgtcggtgatggcgccgctcctcgcctgggctcaggatgctcactggtccatgggcggtctgaacttccagcgcacccgcctccagggccgcatcgaaggatccgtcaagaggctccgtgcccagcaggaagatcgtgcccggatggtgcccaccccctctaagcccaagaaagtccctgttgctgctgagaagatcccatcttctccctctcctgtggacactgtagtaggagatggggaagtggatcttgtggtgaaagactcaactttggcagagctcttccgtgggaggaagagggtgcatgctgttggtggatctcttgaaccgacaaagagagcgagaaagcttggtgacgtgtttgat

SEQ ID NO: 819 - DNA, 437 bp, Lilium asiatic
  Clone ID: LIB3229-017-P1-K1-E2
cacgaagctgctgaagctaaacctccgatctggaaaaaatggcgaccaaaatcccgccaccgagctcgaagaaggcgaatctactggacccgcaatccatcaagcacattctcgacgaatcaataaccgagatcgtgactggtagagggtatcccgaggattttaggtcgagcaacttgaagctgtcgatcgggacggtagccatagccgttgcgcttgctgcgcagttctacccgaagaagttcccggagaatcgggattttctcatcgtctgcatcggattgtatttaattctcgttagagtgcaccggtatctcattaccaaagagaaggatgctatcctctttacccatcctccagacggatcttttagtagcacgggtttgatcgtttcctctaagctgccaaagttcttggacatttacactcttacaata

SEQ ID NO: 820 - DNA, 420 bp, Lilium asiatic
  Clone ID: LIB3229-017-P1-K1-E3
cacgaagctgctgactctaaacctgctgtctgcaaaaattgtcgaccaaaattgcggcgccgagcttgaagaaggcggatctactggacccgcaatccatgaagcacattctggacgaatgaattgccgatatcgtgactggtagatgatatcccgaggatttttggtagagcaacttgcagctgcctatcgtgacggatgccatcaccgttgcgcttggtgcgcagttctacccgaataagttcccggaggatctagatcttatcatcggatgcactccataggatttagttctatgtcgaatgcaccgtgctttaatttccaaagagtaagatgctctactctttacccattcttcatacggttcttatagtggcacggatatgatcgtttactatagaagacataggtcttggacat

SEQ ID NO: 821 - DNA, 432 bp, Lilium asiatic
  Clone ID: LIB3229-017-P1-K1-E4
cacgaagctgctgaagctaaacctccgatctggaaaaaatggcgaccaaaatcccggggcgcgagctcgaagaaggcgaatctactggacccgcaatccatcaagcacattctcgacgaatcaataaccgagatcgtgactggtagagggtatcccgaggattttaggtcgagcaacttgaagctgtcgatcgggacggtagccatagccgttgcgcttgctgcgcagttctacccgaagaagttcccggagaatcgggattttctcatcgtctgcatcggattgtatttaattctcgttagagtgcaccggtatctcattaccaaggagaaggatgctatcctctttacccatcctccagacggatcttttagtagcacgggtttgatcgtttcctctaagctgccaaagtttttggacatttacactctt

SEQ ID NO: 822 - DNA, 437 bp, Lilium asiatic
  Clone ID: LIB3229-017-P1-K1-E6
gtcgggggattatgcgattgtgatcagtcataatccggacaacggcacctccagaatcaagcttccatcaggagctaagaagattgtaccgagtggctgcagggcaatgatcggacaggttgctggcgggggtaggactgagaagccccttctcaaggctggtaatgcttaccacaaataccgtgtaaagaggaactgctggcccaaggtccgaggtgtggccatgaaccctgttgagcatccccacggaggaggtaaccatcagcatatcggtcatgcttcaaccgtccgtcgtgatgccccacctggacagaaggttggtcttattgctgcaaggaggactgggcgtctcaggggtcaagctgctgctactgcttctaaagagaaggcttaaagtgattttgttcgtgtttctactgctttattggcgttttttt

SEQ ID NO: 823 - DNA, 219 bp, Lilium asiatic
  Clone ID: LIB3229-017-P1-K1-E7
ggcttgcatgataatgatgaaatcaaacttagcacccagtacccagtatgttgggtgcgaggggaattcattcagtttgatgctactttggttcataatggtgagtgcaagccgctctatgtatctaaaactcctgtacaggagtgttgtaatggactactactgtattgtaattctgtggaagacttagtgattttggtattatcagtgctcgccaag

SEQ ID NO: 824 - DNA, 298 bp, Lilium asiatic
  Clone ID: LIB3229-017-P1-K1-E8
ggatgctgtgagacatacaaaatttctacaatgtggcgattgcggagttggcgggcgacgttgctgatcttatctgagaggtctccgctgaagtggtatgtaggcttgtgcgcgttcggtttgctttatatttatggaactgtgctcttgactatattgcttatcaagggttgtcattatttactatcatggagtttttgtctaggtatggtttgtgccctggtaaccttgtggtagggctcgtggatgagtaccttatttatgtttttgttaattatctgtttttggtgtcaagtcc

SEQ ID NO: 825 - DNA, 434 bp, Lilium asiatic
  Clone ID: LIB3229-017-P1-K1-F1
gcgacatttttaggactggtggcatgcctgttttggaatatcatagcagttactacggcttggattaggggggaagctgttacgatctggttccttgctatcatctacttcatctctggttgccctggagcttatgtgttatggtatcggccgctttataatgcaatgaggacggagagtgcattgaagtatgggtggtttttcttcttttacatgctccacattgccttcgtagttttttctgctgtggctcctccagttgttttcaaggggaaatctttggcaggtattttgccggcagtagaccttatcggcaagcacatattggttgggatattttacttcatcggatttggtttcttctgcattgagtcactgatgagcatctgggtccttcagcaagtatacatgtacttccgaggtagcggaaaagc

SEQ ID NO: 826 - DNA, 305 bp, Lilium asiatic
  Clone ID: LIB3229-017-P1-K1-F10
accacgcgtgatgtccgacagatggtgataaatgctgtctggccaaggaggacggttgctattgcgattcacaatattgtgaaggggagtactcgtgagctggcgcaggaggacttgtggcatgctgtagacagctatggttaaaagcaatctgcgaatatgaaagctcaatcttcagctaaaactggacaccaaatgaatgataagaatcatctagaacttaatatacttttaaaaagtccctgttatgtttcctgatacggggaatgcctggagtctgcggggcgcttgaaaccctgcggacc

SEQ ID NO: 827 - DNA, 337 bp, Lilium asiatic
  Clone ID: LIB3229-017-P1-K1-F11
gcttggcaaatacaggtgatctgtgggttggtgtcccaaattttcagctgggggggactttacaatggaactatctataccgggaaagagaagcaggcgtataatgttaagtcccttcgaaccaagttggtgcgtgttttacgtgacttttaccttctcactataaagttatattctctctagcatcttagctggccccaaagaaaatgtaccatctttcttgacaaaggcaactagatctttatttgtagattatcagggatgtatgaggctttttttcctcttttaacttactttattttatttcagtgagcaccttttttccttctttatgtgc

SEQ ID NO: 828 - DNA, 437 bp, Lilium asiatic
  Clone ID: LIB3229-017-P1-K1-F2
cggacgcgtgggcggcaacggagtgggggatgagaaaggcgttgctgcgcttccgagattcttcctttccttgtctaacaaggagaaggaggaggatttcatggcgatgaagggctgcaagctgccgcagagaccaaagaagcgggcgaagtttatacagaaatctatacttctggttagcccgggggcgtggctgacggatctatcgcaggagaggtacgaggttagggagaagaagagctcgaaaaagaggcggagggggttgaaggctatgagcatggagagtgactcagagtgatggaatgggagattatgttcaacggttcgtgggttttaatgaacataatgcaatggtggttcaggtctgtagattttggaatctttgtatatccatcttaactgagaaattttgggtccctggttttcttttaatttta

SEQ ID NO: 829 - DNA, 407 bp, Lilium asiatic
  Clone ID: LIB3229-017-P1-K1-F3
cccacgcgtccggcggaggttatcctggaggaggatataacggcggcggctaccacaacggcggcggtggaggtcgctgctacaatggttgttgccgccgtggatactatggtggttgccagtgttgcgcgcatccagatgagatccctgatccggaataccgtgctgaggcgatgtttggacactaaatggggtaacccaggcctgtatgttgaatggtttccaatcgatgtgtggttggatttatgtaccaagtattgaataaagtgactttcgagtgtaagaggtgaggaaacatttgcccaatgtttctttcctcaagctgtattacgtactcttgtcacataaatgaaatatgctcagttgtttgcaacaacttattaaaatataaatattaactgaaaaat

SEQ ID NO: 830 - DNA, 370 bp, Lilium asiatic
  unsure (1)..(370): unsure at all n locations
  Clone ID: LIB3229-017-P1-K1-F6
aggtccgcccacgcgnccggcaagcgagcaactataatgagttactcagatctctggacggcaacaaaggataggggacgcgcaattattttcttagtaacaaggactttcccagctatattgaatgtcaagagaacgttgatgaaccctacaaagatcagaagacatggacgcggatggcgatcttgaatacagctggtccctacaaactcagcactgacaggactatacatgaatatgccaaagacatctggaacatcgagcctgatcagccgccataaagaatccgttcttactggcccatgggatagaaaagttttttttgtttgcggacaaaggccgaggatccatagataattgatcacaaaac

SEQ ID NO: 831 - DNA, 229 bp, Lilium asiatic
  Clone ID: LIB3229-017-P1-K1-F7
gcgagatcacagggggttgtccccctgggagagttgaagatcaagattagagtttagattagggtgagattagagagatcttgtaataagtgtgagttgtgagagatttctgattcgagttctcatgggatgtaatcttcttttcattctctgtgagcattgtaaggttttctgaactcatcttgatgtaataactcttttatattgaatgtaatgtgatacttttact

SEQ ID NO: 832 - DNA, 367 bp, Lilium asiatic
  Clone ID: LIB3229-017-P1-K1-F8
tttttgccaagagaaacgtatgcttttactctgaacaattttctgtgtaagagttgacattcccaagccaagagaaacttatgttttactctgatcaactttgtttaaaagatttgtcaaatagtaaatagctttctacgtgaaaaatcgttcaccaaataaaagataacaatcagtagcaacttatcagactcttaaaaagtcctgcttctgttacctgaaacggggaaagcctggcgtctccggggcgcttgaaaccctgcggacctctctgcaccatcatttgatcgcttagatgcccggtctctccgacgttctccagatcccaggtgaggagccccaggatcatcaactctagatcgcgggc

SEQ ID NO: 833 - DNA, 408 bp, Lilium asiatic
  Clone ID: LIB3229-017-P1-K1-G1
ctgggccagatcaccgagtttgggaaggaggcacgtctgcgcggcaagggaaacctggcactaaacagtgttcccacaatcgccgcatccgaaccgtgggacggttaagacggtgaggtcttggaagaagatgaattttctcttgatgagctcatgggcgaagacaccgcaggccaagatgagttgtaacctgcatgcgcaagatattcgaccatttggtctcttacttataactgatctcatcattgctagtatctaatcacttagaacgcttaacaatcttgctgagtctcggagtctctgtcaagtacaaagaattatgggcctgttgggtttgaggagattcgatagtgattcagtgtgtgacttatattgctcacagccaaaaattaaatgtcattttcattc

SEQ ID NO: 834 - DNA, 307 bp, Lilium asiatic
  Clone ID: LIB3229-017-P1-K1-G10
cgttccaaaaaaaaataaaaaaaaaacaaagactgacaatattaaagatatcaaacaggggggggcattcattccgaacacaaaactaaaaaaaaataaacaccaaaagggcagccgttttacaggacccaaactaccttacgactgaataacaaccttgaagttctcctatttaatcacctaaaaaaacatcacgggctcgccatctacacatgagacaatgagaaaaccacgggtcaccccatacttaaaaaccctttaaactcatacccttttttgcactctccctttttacctaaaattgtcc

SEQ ID NO: 835 - DNA, 218 bp, Lilium asiatic
  Clone ID: LIB3229-017-P1-K1-G11
gctacccaactacacataatcttcaagccgcgtccgcaacaccagccggaggaggctttccaaagtttcaaccacttccaataaaccgaacctagcgtctatcgttatgcccggcaaaccaatatggtgccccaactacatgacttttacccacatactataaacttaaattctcggtagcgtccttatatcccccacgataatatcttccaaactct

SEQ ID NO: 836 - DNA, 395 bp, Lilium asiatic
  Clone ID: LIB3229-017-P1-K1-G2
ggggggtgttgttaaaggcacaacccaaatttaaaatgtattgcttacacatggatgcgtctccaatacatatggtactggtattaaagtatctgatagggatacaccacccttctgtaagtagccatagttcataggtcaatttgcttataataactgaaaatgacacaactttagtcaatatgcttgatattaaccaattgaaatgatgtcttcagtcaaagtgattgatcatacccaactaaaaaatgatacatgggtatagccaaattgcgatgactaaaagcaattgacacgtgtttagttaaattgtttaaaacaactgacagaaaatgatcccttgccacccaccccacaaaaagtcgatgacctttccatagtgataaaatcttttg

SEQ ID NO: 837 - DNA, 415 bp, Lilium asiatic
  Clone ID: LIB3229-017-P1-K1-G3
cggacgcgtggggttcgacaattggaggcagactggcatattgacacaaacctcgaaatcgtctcccaactctctcggtttatcagacaccaactgcacatcacaccgacgatttcaggaccgatagcaccgagcgtcttcacctcaaccagtctggagcagtacttttcgtgcctctgatataaggaaatgtttatacatgatgtctgatcgattcactctgccatcgtttggttatcttggatgtgcgatgattacaccatctgtatattgtacaacactgggagaactgttgaatctgtttgtaataggtccagaaagggcagcagtagggtcgtgagatagctatgttttgtgggaaataaatgctgtcatcttgtacttcaatttctcaatgattaaagggattcggatc

SEQ ID NO: 838 - DNA, 225 bp, Lilium asiatic
  Clone ID: LIB3229-017-P1-K1-G4
ggggggaaaaaaaaaagggggcccccccttttcctgggggggcccgtccccaaggtttttttttccaatgcggggggtttaaaacattcaaccccaaattttacctaaaagggcccctttttttcttgaaaaaaaaagggcccaaggcgtttttttttccccgggcgccggcatttttggtccccccgccccctataaaagggggccccaattttttgggcgggg

SEQ ID NO: 839 - DNA, 437 bp, Lilium asiatic
  Clone ID: LIB3229-017-P1-K1-G5
gtggatatccggacgacccaggccccgactaatccctctggatgtacatgtttgccacactatgcataccaggaatcgaatatgcgaccaacaaggagcaaatctgcgctgctagccaaccttcccaacccctcggtgtcaaccaactccaattgttaacacaacaaaaaattaaacattgttggaccatttaaccctcttggttcggcatataatagaattgggtggtggcaatttataatctctcttaacaattaaggactttaaggggcaaggaattattggtttgatttaaatacttcgctacttccatcattgcaattgcctctactttccacggacttctgcacgagctccagctgacgtgtgtactttgcatgcatgttccttccctcctgcatgttgtcagacacatatttgatacttttgccatgcac

SEQ ID NO: 840 - DNA, 400 bp, Lilium asiatic
  unsure (1)..(400): unsure at all n locations
  Clone ID: LIB3229-017-P1-K1-G6
gnggatatccggacgacccaggccctttctaatccctctggatgtacatgcngagcagacgtatgcataccatgaatcgaatatccgaccaacaaggagcaaatctgcgctgctagccaaccttcccaacccctcggtgtcaaccaactccaattgttaacacaacaaaaaattaaacattgttggaccatttaaccctcttggttcggcatataatagaattgggtggtggcaatttataatctctcttaacaattaaagactttaaggggcagggaatcattggggggaggagatactgtgctacttccatcattgcaattgcctctactttcaacggacttcttcacgagcttcagctgacgtgtgtactttgcatgcatggttccttcctactgca

SEQ ID NO: 841 - DNA, 360 bp, Lilium asiatic
  Clone ID: LIB3229-017-P1-K1-G7
cccacgcgtccgagagtgtgttgtatgatggagtttgtggttatagggggatgaagcagatgatgagcttcaacatctatgagggaaattgttgacctcaccagccaattggcccagacaaagcagccaggcacatgcctagggtggctctgtctactggtggtggctggtgagttggtagccactttcttctcccattggttgattattaactaaagagcttctgatgcagacccctccataactccatcacataaggacaatgaggcccaaggcactaggaaactgaatctgcagttctctagaagtctctatactttaccagaagacagcagcctgctacaaggggcaagattgaca

SEQ ID NO: 842 - DNA, 86 bp, Lilium asiatic
  Clone ID: LIB3229-017-P1-K1-G9
aaaaaaaaaaaaaaaaaaaaaaaaaaaaaaaaaaaaaaaaaaaaaaaaaaaaaaaaaaaaaaaaaaaaaaaaaaaaaaaaaaaaaa

SEQ ID NO: 843 - DNA, 233 bp, Lilium asiatic
  Clone ID: LIB3229-017-P1-K1-H1
gaggcctcggaggcatacttggttggtctgtttgaggacaccaacctgtgcgccatccatgccaagcgcgtcaccatcatgcccaaagacatccagcttgcccgccgcatccgtggcagagggcttgaaattcctcctgtgggtttgcttgtggtggtttctactgtctcgtagaaagttgtaattcggcagtcagtttatgcaatctaattgaagtttgttatctgcccgtt

SEQ ID NO: 844 - DNA, 426 bp, Lilium asiatic
  Clone ID: LIB3229-017-P1-K1-H10
gaaggtgattatatgttgccaccttcccttagaccccaacgcagcagcgccagaggcacttttatggaactacggcgaggtgaccgatgtgatacatcggtacaggtgcgtgaaggcttgtctggccggccatgaccatgaaggcggttattcggttgattcacatggtatttatcactgagttatcgaggctgctttggagtgccctcctgggagagatgcctttggtcatgtagatgtctactatgatcgtttgttcctctcgggtactgatagaatgccaggtactgagttgatttttggttcttaactgacgtattgctaatctgtttgatatttataattctgtttcttacctgggtattatggactatttatgacatcataatttaaagaagtaaacaaaatatatctttctggatctag

SEQ ID NO: 845 - DNA, 400 bp, Lilium asiatic
  Clone ID: LIB3229-017-P1-K1-H11
catcgcgtccgtatggcaatcatatgtctgctccttagcttaaacccgatcgtaccagcgggagggggacttctatgtaactacctgctgcagaccaagctaatccatcgccgcaatctcctgaagggtagctgtagacggccattaccatagacgaaacgtgtatcctttactgagaaggcctttatctaatgattcatgtagtgaaatttaaggctgccgtccctaaacataaagccgtcggcctgccgatgtatgatatcatagcttgtttctctgctcaaccgaataaagcacccccacttgctgtgaagtatccgtatatacccgctgtatagatcaaactttttggattcatgcgcttcaaagctgccgcttacatgatgtttttgggggagtg

SEQ ID NO: 846 - DNA, 370 bp, Lilium asiatic
  Clone ID: LIB3229-017-P1-K1-H12
tcgttattaccttgatgactgatgatcatatactgatatttttcaagtcaagaggacggcatccattatatatttcattatgatagagagctactgagttttgccacacctggaggggtttagtgcagagcctatcagaacacccatctcttacactaagatatggacatggatatgagattacctagtgctgcagtttgagaattactttttcatatgttgaggcttcccgtattttaagactgttgcgcttagatgatgttcttgttttttctatagagttcactttttgaatttttgagaagctatgcttatgtttgactaaatgtatcttggtttgggatctatgttaactcttatagttgggtgg

SEQ ID NO: 847 - DNA, 371 bp, Lilium asiatic
  unsure (1)..(371): unsure at all n locations
  Clone ID: LIB3229-017-P1-K1-H3
cttgatttcttcccaactgcaaagcggtctgccgaaggtttttcagaacattttgtcaaagaaggtctagtagctcttgttgaatacaatgataggaaaatgtttgaggttaagctgaaggagatgaaatcagctctgacaacccagattgctgaagagaccgatgtatctgaagtcatagagactgtgaaacaacgggttaaggatgccaagttacctgatattgaaatcatacgtattttgtgggatgttttaatggatgctgttcagtggtctgggaagaatcaacaacaaaatgccaatgccgcactacgccaggtgaaaacctgggctcaactgttgaatgcattntgcacaaatggaaactggaa

SEQ ID NO: 848 - DNA, 406 bp, Lilium asiatic
  Clone ID: LIB3229-017-P1-K1-H5
gcagctcgtctcccctttcggcaagacagatactgcctctgttcttcatgaagcacagtgctacatccgattccttcacgaacaggttcaggttctgagctccccttaccttgaacacctgccgacctctgtgcatgacattggaacaggacgaagatggaacgatctccggagccgggggctttgccttgtccccatatcctgcaccgagcacatggccaacagcagcatcaatggtgctgatctcttctgctctcccagctcgaacccctatgcctcaaacccctcccctcctttttgggttctgtttcatttccctttttagatcaaactttttgggttcctgcgctgcagagctgctgcttccatgatgtttttgggggagtgaagcagagggaacagttca

SEQ ID NO: 849 - DNA, 277 bp, Lilium asiatic
  Clone ID: LIB3229-017-P1-K1-H6
aatcttttagatttggaaggaaattaaaattttaactagttaactatttttgttctcaaagacatatacttgtaattattagtcaaaagagaaattattataatattgatattatgcttgtggatgtggtaaaagataatcgagctcatccatatcatcataaccctgaagttctctttttattaatggatagtggaatgaatgatgaagtcaaatataaaagaagacatttggtactatatataagattatctttaataatggtcttttaattttt

SEQ ID NO: 850 - DNA, 412 bp, Lilium asiatic
  Clone ID: LIB3229-017-P1-K1-H7
ccacgcgtccgcggacgcgtggggaagccccaccgcttccgtcccggcacggtggcgctccgtgagatccggaagtaccagaagagcaccgagctgctaatccgcaagctccccttccagcgccttgtccgtgagatagctcaggacttcaaggccgacctccgcttccagagctcggcggtggcggcgctgcaggaggcgtcggagtcataccttgtggggctcttcgaggacaccaatctgtgcgctattcacgcgaagagggtgactatcatgccgaaggacattcagctggcgaggaggatccgtggggagagggcttgaagattaggtgtctttattcgctacttgcgaatatatcggattcactggttgaatttgtatgtgatggtgcttgatttggggtatcttt

SEQ ID NO: 851 - DNA, 276 bp, Lilium asiatic
  Clone ID: LIB3229-017-P1-K1-H8
ccaacccttccgggacaccttgataagccggaccatttgctatcttgtacggcggacataggtgagatcctgttgtcacatagaagcaccggtctgctaatacgaaagctccccttccagcgccttgtccgtgagataagctcaagacttcaaggccgacctacgctatcaaagctcggcggtggcggcgctacaagaagcgttgggggcatacctttagaggctcttccatgacaccaatctgtgcgctattcacgctatgagggtgagtatcat

SEQ ID NO: 852 - DNA, 135 bp, Lilium asiatic
  Clone ID: LIB3229-017-P1-K1-H9
ccatcttttcgcggacgcgtggggaagcccgaccaagtcctcacccgccggggggcgattggcgagattctttagtcccataccagcaccggactgctaatgcggatgctcacattgcagcgccatgtacaaaag

SEQ ID NO: 853 - DNA, 236 bp, Lilium asiatic
  Clone ID: LIB3229-018-P1-K1-A10
acgcccacgcgtccgcccacgcgtttgttcgcgtccgaaaaaaaaaaaaagggaagggaaaaaaaaaaaatttgatgaggaaaaaaaaaaaaaaaaaaaaaaaaaaaaaaaaaaaaaaaaaaaataaaaaataaaaaaataaaaggaagttaaaaaatttaatatttttttaaaaaaaatatttttttttccagttgtttataataatcgaagaggtcagaactttattgttcttt

SEQ ID NO: 854 - DNA, 413 bp, Lilium asiatic
  Clone ID: LIB3229-018-P1-K1-A12
cccccggcttcttgatccgaaggcgttccaggatactattgatttgtttgttgagagatataaagggaaagggatcactgttgttgcagggattgaagcaagaggcttcatatttggtcctccaattgccctggctatcggagcaaagtttgtccccatgaggaagccaaagaagttgcctggtgaagttatttctgaagagtattctttagaatatggcacagacataatggagatgcatgtaggagctgtccagccaggagaaaaaaaccctcgtcattgatgaccttattgccactggtgggaccttggctgcagcagtcaggctactcgaacgtgtcggtgctgaagtggttgaatgtgcttgtgttatcgaattggcagaactaaagggtcgggagaagttaggagac

SEQ ID NO: 855 - DNA, 402 bp, Lilium asiatic
  unsure (1)..(402): unsure at all n locations
  Clone ID: LIB3229-018-P1-K1-A3
nnctttctctctcatccccaacaccaaatcgccaccgccatctctctcatggcggcccagtgggaaactatgggaaagcggttagataccttggaggaagaaatcgagaatttgttgaagaacattgcaggagatgttcagaatccaacaatccagtcgccatcagtcaatctccctctggggaagcggttggatgctgcagagaaaacactcgaagaaatcaaagatatgctgaagaatactgagaattcttctcctccaccagctcccagggtacgcccctcttctgaagttgaatgttaccacggggaatatgattccatttacttgttagactggctagcactcatggatgcctatttcgctcggcataacattactgatgactggaggctcccaatc

SEQ ID NO: 856 - DNA, 138 bp, Lilium asiatic
  Clone ID: LIB3229-018-P1-K1-A4
gcgagacgtattcctgtaacagattctagagcaaataatgattttgtttgaaagaaaaaaaaaaaaaaaaaaaaaaaaaaaaaaaaaaaaaaaaaaaaaaaaaaaaaaaaaaaaaaaaaaaaaaaaaaaggggggcct

SEQ ID NO: 857 - DNA, 368 bp, Lilium asiatic
  unsure (1)..(368): unsure at all n locations
  Clone ID: LIB3229-018-P1-K1-B1
cccncncacgcgtccgggagatttggtttttgtgttcaatttccatccaattaacaactacgaagggtataaagttgggtgtgacttacctgggaagtatcgagtcgccttggacagtgatgcaagggaatttggtggatatggaagagtaaaccacaaggcggaccattttacaactcccgaaggcataccaggagtacctgagacgaatttcaataaccgaccaaactcgttcaaaatcctctcacctgctagaacttgtgtggtgtattacaaagtgaatgaagagctggaagttttagaagtgaatgaaaaactggaagtttcggacgaaccggaatcggaagtttcggaagtgaatgaaaaac

SEQ ID NO: 858 - DNA, 431 bp, Lilium asiatic
  Clone ID: LIB3229-018-P1-K1-B11
cccccgttctcgagcgtcgcctccagacccaggtcttcaagtccggcatggcgaaggccagtcatcatgctcgggttctgatccgtcaacgccatatcagggtggggcgtcaggtggtaaatatcccttcattcatggtgagggttgactctgcgaagcacattgactttgctctcaacagtcctcttggaggtggtggtcctggaagggtgaagaggaagaacctgaagtctgccaccaagaaggccactgatggtgatgaggaagatgaggaatgagcaccgatgctggcaaggaataaatctttttacttgctttctggagtttagttgtgtgatctttttgtcaggaatgcctttaagttttgtggaactgtgagtctctgatctctcttggtaactggaaaagcattgttggaccccaaattttag

SEQ ID NO: 859 - DNA, 433 bp, Lilium asiatic
  Clone ID: LIB3229-018-P1-K1-B12
cccggccacacgcacaagaagaagaagaagcagttgcagactgtggatctcaaggtgaggatggactgcgatgggtgtgagctcaaagtcaagaaaaccctatcttccatgtcaggagtgaaatcagtggacataaacaggaagcagcaaaaggtaactgtgacgggatatgtggagccaaagaaggtgctgaagaaggctcagtcaacagggaaaaaggctgagatctggccttatgttccatacagtttggtgtctcagccctatgttgcaggaacctacgacaagaaagcccctcctgggtatgtgagatatgttgagtctgttgcagtctcgagctatgcaagcaaacaggaggaccagatcaccaacatgttcagtgatgacaatccaaattcctgctctatcatgtgagaggaatgaagtacatgag

SEQ ID NO: 860 - DNA, 185 bp, Lilium asiatic
  unsure (1)..(185): unsure at all n locations
  Clone ID: LIB3229-018-P1-K1-B2
aaaaanatccactcaccttcaacagtgatgcaaggcaatttctacgatatagaacagtaaaccacaaggcgtaccattttacaactcccaaacgcataccattagtacctgacaccaatttcaataaccgaccaaactcgttcaaaaaactctcacctgctaaaacttgagtggtttacttacaa

SEQ ID NO: 861 - DNA, 313 bp, Lilium asiatic
  unsure (1)..(313): unsure at all n locations
  Clone ID: LIB3229-018-P1-K1-B4
nnntattgaacatttcatagaggagtttacaacacgcacatagagagctcaggggggcgcatgcactaagagtacgtgcgattaaaaagataaatccaaagaagctatcaatcacattccacgctcgcagccagctgttccccttatgcgtggtgctagatgagtacttaaatgtactaacttacttctactgattgatggccgtgcattagcacagacttattctgcatatgtaaactctactgtattgtgatcggagatacattctaaagattaatataatgtatatcttaatatatagcagcatttccta

SEQ ID NO: 862 - DNA, 423 bp, Lilium asiatic
  Clone ID: LIB3229-018-P1-K1-B5
cttcatcgtccaccgtccactaccttttcgacaactacttccacgacgggggccgccgtccacttgaaagttcttcgtctccaagctcgtctatgaagacgacgtcttcgatggcgatgttcaagacgacctccactgtcgatcttcaacacatgcagagttctaaaagcgtcaagagatctccagaagaatccagagagcaacgaggaccgttcattggagatcgagatcggatcttcagcttgctaaataaggtaagatttcaataatttttatactgatcttttatttccttttatagatcttctcaacctataaagataccccaagagcagtgaagataatcaaccaccggaggcccggaagggtcttggggttagggttccagtgggtcttagttctagggtttattagtgagatatt

SEQ ID NO: 863 - DNA, 194 bp, Lilium asiatic
  Clone ID: LIB3229-018-P1-K1-B7
cccgccaaagccagcatcaggcagacaaagaaaacttcgaactagttaatttttgttgtgttgcgtttggggaatattagctgttgctcctttttcctgttgatatcatgtgataggggataatttgcaatgtgtcaagttttattgagttgatcaaaacaaaacaaaaacaacaagcaaaacaaaaaaaatac

SEQ ID NO: 864 - DNA, 426 bp, Lilium asiatic
  Clone ID: LIB3229-018-P1-K1-B8
cccgctgaggatgatgacttacaagggctcgctgctgctttgcttcctcctcggtctcgtctccttctctcttatccaggccaaagcaaccaaggaaagtttgaaggaagttactcacaaagtctactttgatgttgagattgatgggaagcctgcaggtcgtattgtgatgggtctattcggcaaaactgtgcctaaaacagcagaaaacttccgagcactttgtacaggtgagaaaggtgtcggaaaaagtggcaaacctcttcactacaaggggagcacattccatagaatcattcccagctttatgctccagggtggcgatttcactcttggtgacggaaggggaggagagtcgatatacggtaccaaatttgaggacgagaacttcaagctcaagcacacagggccaggatttctctcgat

SEQ ID NO: 865 - DNA, 407 bp, Lilium asiatic
  unsure (1)..(407): unsure at all n locations
  Clone ID: LIB3229-018-P1-K1-C1
nnaagaaagaagctctctgttctctttccatctccttcttcaccatgaagtgctgtgcaggacaaacagaagggtgtgggaatcccaattgcagctgtggatccagctgcaactgttcagactgcaaatgtggtaaataagggaggacatgaggtaaataagagaggacatgagggtgcaaactgtttgcatcatgagctgttgttgttctccatggcctacatggtttgtgttggatttgtgtttgctgtggtcagaagtactttgagtgatgtcttctatgtatgttttgtttggtgtatgaaccagtaatccttggtttgtgttggatttgtgtttggtgtggtcagaagtactgagtaatgtttctatatatgttttgctcggggattgaaccagtaatcctt

SEQ ID NO: 866 - DNA, 383 bp, Lilium asiatic
  unsure (1)..(383): unsure at all n locations
  Clone ID: LIB3229-018-P1-K1-C10
cgggtcgaccnannaacataaatttgagctttccggcatttttttttctcctagaggtgaccctcaggttagcggtctgctgtgatatgggtgccaatgatatcttgaatgtgtctgctgaggataaaactgctgggcagaagaacaagatcaccatcaccaatgacaaggtcagtctcagcaaggaggagatagagaagatggttcaagaggcggagaagtacaagtctgaagatgaagagcataagaagaaggttgaggcgaagaatgctcttgtgaactactcctacaacatgaggaacattttttgtgactagcataatatacaattcgtttagttacatataaagatcttcataataatgttatttctcttaatgttt

SEQ ID NO: 867 - DNA, 431 bp, Lilium asiatic
  unsure (1)..(431): unsure at all n locations
  Clone ID: LIB3229-018-P1-K1-C2
naaggggatacagaggttgcagttaaggatgataccaaaaatggaaaggctcctgaagatcctcaagtgaaggtggacatcaacgtgcaggaagaagcatcgaatgagcagcaacaagttaaggtggattgtcccgaagtggttgtaggagagaaagatgttgcccgtgaaacagagcatatggattggacccgggagatacaggttgaagatggtaacttaccttcgtctacattgtttgatgataaaaagggaggtgattcaggttccatctcagaagttactgctgcagacaccaccccgaaggtcactggaaacagctgtatcaaccctgaagacggtgaagtgaagccccaaccaccccagaagtacgccattgatctagagcaactgccagcttcttgagctggtttatgaatatgtcggttatc

SEQ ID NO: 868 - DNA, 426 bp, Lilium asiatic
  unsure (1)..(426): unsure at all n locations
  Clone ID: LIB3229-018-P1-K1-C3
tttccacgcgtccgcgagcttacacctgtccgttcccgtgcaggatttgtgtgaagaacggtggagatggcacacgcgcgagcaaggacgatcaagcagaaagccgttgatgcacgcatggagggtttagatctgaagatggcgatgaagggctctgatttgatgaagtacatggagcagctgggatcagacggactcaaggatgctgcagcttgaagcttctggaggcgcatgtggaagaagctcgccattggtcatgcatgcgagttgctgggagaagaaagggatgccagaccgaagttcaagcctataaagccccagcccgagcgaaggtttctcccaagcctcagaaggagaaggagcacgactctctgctgctgagccttcatccnctaaaaactttccttagtgacagaggataagttt

SEQ ID NO: 869 - DNA, 430 bp, Lilium asiatic
  unsure (1)..(430): unsure at all n locations
  Clone ID: LIB3229-018-P1-K1-C6
naacatggtctgctacccaagaaagagctctcattcaggcgctaaagacattcccaaaggatgtgaatcagcgttgggaacgggttgctgctgctattcccgggaaaaccatgaaccagtgcagaaagaaatttttatcaatgaaggaggacttccgaagcaagaagagtggttaagtcttttttcttttgcaggtaagttcaatatagaactaaaaaaaggtgacctcttcatcatggtgctgaaattttcctcattactgggcttagctgcagttatatctgggtgctctttttcccgcaacagaagtttttgtgatgctttaggatgtagaactagatgggtatgtttatttaagacagaactttggtgagatctgaccgttgctactctttcatatgtatgaaagttntgcaagctccttgatggg

SEQ ID NO: 870 - DNA, 387 bp, Lilium asiatic
  Clone ID: LIB3229-018-P1-K1-C7
ccaccgatcctgattggtgtgttatgaaatcactaaagtattgaatccaaaaaaacaaaggcaaaaaataaaaattatcggaaaaaaaaaaaaacaaaaaaataaaaaacaaaaaaaccataaaaccaaaacaaaaagaaaaaaaaaatcaataaaagaaagaactaacaaaacaagaaaaaaaaggggggccccccttttatgggccccaaatttcaatccccgacttaccaaaggttacctttttattatggcccccaaatttaatttacttcccccctttttctccacttatatctgggaaaaccctttcccgccccaaattaattccctttgcaaaaaaccccctttctaccagtgggtgtattattaaagagcccccccccg

SEQ ID NO: 871 - DNA, 366 bp, Lilium asiatic
  Clone ID: LIB3229-018-P1-K1-C9
cccccgtaaatttgagctttccggcatccctcctgctcctagaggtgtccctcagattactgtctgctttgatatcgatgccaatggtatcttgaatgtgtctgctgaggataaaactgctgggcagaagaacaagatcaccatcaccaatgacaagggcaggctcagcaaggaggagatagagaagatggttcaagaggcggagaagtacaagtctgaagatgaagagcataagaagaaggttgaggcgaagaatgctcttgagaactactcctacaacatgaggaacattttttgtgacgagcataatatacaattgtttagttacaattaagatctcagataatgttattctcttaatgttta

SEQ ID NO: 872 - DNA, 421 bp, Lilium asiatic
  Clone ID: LIB3229-018-P1-K1-D11
ccggaagaatcgacggcaatgatgcaactcgaaggcctataagaagggaggaagtccgagcagtaagttggttccttcgttctcggttgggttctcggattacttcccccgctgatacctcgatagagggatactggagttacttctccttgggaagacccgagccgacctccggagggcaggatcaccccacttcatccagtgagcactgaggaaccactcctggttcgtcagttctcactgggattgggtatcctctgagagatagttctgaattgtgagagttgtaagtgttcaagtgttgtaattcattgatgttcaactgctgattcattatggtttgtaagctattttcttgaatccttgtctgtaactggtaactgaactttgatattactgtaatgaattgctattatctgct

SEQ ID NO: 873 - DNA, 429 bp, Lilium asiatic
  Clone ID: LIB3229-018-P1-K1-D12
ccgcccacgcgtccgcccacgcgtccggtggattacggccggcctccaaatgaggtacatcttgtggaatggctcaaactcatggtaggaagccgaaaagccgaagaagtagtagatcctgagcttgaggtcaagccagcgacccgtgctcttaagcgagcccttctcatcgctttgagatgcgttgatcctgactccgaaaaaaggcctaagatgagtcaagttgtccggatgctcgaagctgatgaagttcctttccgtgaggaccgtcggaacaggagaagcaccatgggcagcatggagatagattccctaaaggagactccgacttccggcgatcaagataatgacaaagctgaaaatgcagaacctgaaacataggtgcgacgactaattttatcgaagaacggcgggatattcgatttcttt

SEQ ID NO: 874 - DNA, 375 bp, Lilium asiatic
  unsure (1)..(375): unsure at all n locations
  Clone ID: LIB3229-018-P1-K1-D4
nnatcctgctgctaatggcgaagatgggagtgacgatgaagacgatgatgaggacgacgacgaagatgacgaggatgatgatgaggatgatgaggaagaggaggatgaagaggatgtccctcaaccacctaccaagaagaggaagtgatgtggttaatggtgaaatctgctccctttgcgcacctagttccatttagaggatagaaatagggagggtgtttagttttaagctggctctgtgatgtagacttggttatgctgtaatctatgcttgaattctgtttttgttgacagtagttggtggtgttagatcttttaattttnttnaaacaaaaaaatatctattattttttatttttttttataaataaaggg

SEQ ID NO: 875 - DNA, 420 bp, Lilium asiatic
  unsure (1)..(420): unsure at all n locations
  Clone ID: LIB3229-018-P1-K1-D6
ctncncacgcgtccgatccaagtgcttctcaaagtttctaatcttcaaactggtttccttccattatcttgatctgcctttttaaaagaaatttattaacgctttccagtgttttaatcatgtactgagttcttacttcccttgttcgccacttatctgtatgctaatttcacgcaggcataaaatactcggtcatcgtacccaatgcagcaattgcaagattgtccatggacagttttgtggtgattgtctgtacatgagatggagaattccagagcaatgttaccagattcactttgcctattcggccccttgcattcaacaaatctgctagcttgttgggcacagcgggtgacgatgatggcatcacgttgattgccactgtagacagttcgatctccagagtgctcaaaggccatg

SEQ ID NO: 876 - DNA, 426 bp, Lilium asiatic
  Clone ID: LIB3229-018-P1-K1-D7
accgctctcccctcggatcccttcgtcgccgcttctctcccccatcatccatggcgaggccagggccctactccggatgcagcaccctcgccctcgtcgcccgcaccgcggcgttctcgtatggcgtcgtctacggcagcatcaagctctcctacctcaaggctaaggcgaaatctcaaaagaaagccgaggcaaaagctcatcactgagtgtagtctgacctcgaggtgttttttctgctgtcaatgatttctttttatccaaaccaaaatacaggaagcatggttggaatttgaagccattacttgttctcaataatgtagcttctgttactcggcattgttgccaccttttgtttactgttttgttgtttagttcctaagctactgttcaactggtgaatagaatattctgcttttttttcac

SEQ ID NO: 877 - DNA, 421 bp, Lilium asiatic
  Clone ID: LIB3229-018-P1-K1-D8
cccgctccaaaggagacagcaccggactagagtttagctgtaccgctttccctgacgatgtgcagattgatagcatgtccgttcctcggcggaacacttcagatgaggagttaattgcttatgagggtccggatttcggagatctggatgagaacctgcagaaggcttttcagaagtatttgcagctgagaggtattacgccactgaacaccaacttcttgcatgaatacatgataaacaaagacagccgcgagtacttgttctggttgaagaatttgaagcagttcatgcagaaatgatacctatggctactagtttgagatgcttctaagaaaataagtagtatcaacaaacgtgtctggattggatgtacatctgagaatcgaaggaggtgaagggcctggtaaaattttttgagggt

SEQ ID NO: 878 - DNA, 413 bp, Lilium asiatic
  Clone ID: LIB3229-018-P1-K1-D9
cccgcccacgcgtccgtgaaagagagctcatatttcgaccaaacggccttgatgtgagccttgcgactcatgaagaaacatgttatgaccataatatctaacaacatgtaaggagagattaaatgttaagtcaggattatcagagttcttttgccataacaatgccattagctcacacaaaatagtttgtattgagtaaatattaataaaaaagaaattaggtgtttgattcttttagtgtaatatgtttgctatatatatacataacttagacattatatatgttaattatatggagaatgtgataaacatgttgtatatgtaaagagtcattatggccaattgtcaaccacacaatatatattcctcatattggacatgtcctaattaaaaaaaaaataaaaattaatttt

SEQ ID NO: 879 - DNA, 312 bp, Lilium asiatic
  unsure (1)..(312): unsure at all n locations
  Clone ID: LIB3229-018-P1-K1-E1
nntaactatacaaaggaagcgattttgcagttctaccagttcatctggaagctggtctatgcagaatatgccatatttcctctgatataaccgagcaaagatatcaattttgcagttcatcggtcatctggaagcttttctatgcagaatacgtgatatttcctctgttatgaccaagcaaaggttattcttatttgtttgttaattgagtttaatttagccaatttttacttttttgttttacatgtagtggatcagtgcttaagaaaggttggataaattgttggttctatacaaacaaatcgttttatc

SEQ ID NO: 880 - DNA, 392 bp, Lilium asiatic
  Clone ID: LIB3229-018-P1-K1-E10
ccgcaacgttgtcgcctccgcttcgctcacatctcacctatcggccagcgcgagggcgtggtgcgagctctctcagggtacttgaagtgtttgttggattctaaagaagcatgagagcagttttgtttgggtgccttgtgggaatttcgtcacctagtaatttagttaaaagttggattaccttcctgctattggaatttatttggtcgtaaaatacaaccaatttaaaaccattatcttaattttgttaatgttcatcaatgcactggtatgtgttttcagtgtcagaataatgtttcattatttaacaaatttatgtttcagttccccagcttgggtgaattgttaaatcagtttatggaagcattgggttgaaatacactattgcatgg

SEQ ID NO: 881 - DNA, 431 bp, Lilium asiatic
  Clone ID: LIB3229-018-P1-K1-E12
cccgatttggcacccgcagtatacgatgattaatctccaatcccctggcgggagatctggacttcctattgcggtgatcaagaaagcaatggagtcctcagctatggtctgggaggctaattttgcccgcaatctggtctcattgtcagcaattagtctttatttggtaattactcttcctcgtgtatactgatgttgtaaagcagttggttgctactaaatccaccctaatctacgaaccatgtggtgaggaatggattcaacattgcacctgatctgttgctaataacctcactaaggcacttgtcctcctaatggttgtcagcaatcatatattaactgctttaccctcgtgtatagatccgtcaatggattcaacatggcatacaattcaaaaatgcaaaggtaaactttttgcggcagacattcta

SEQ ID NO: 882 - DNA, 425 bp, Lilium asiatic
  unsure (1)..(425): unsure at all n locations
  Clone ID: LIB3229-018-P1-K1-E2
ccatcataaaaatgctataatctggctttcccattctaatggagcatttcagagacgtgtatacagttttttggtcctaaagtgttgtacggtatgaaatttacccacaatttatcttttgatgtaatatgtatttttgaaaagctatacttttgctacaaaaaagttactatgagaaaaataataatctgtctgatctgtttcggaattgtatttgtttgaagaaataagtcacatttagtaccgataaattctttttctttattaatttttgtagaagacttgatttttttcccggtattagaagggtaatactaagcctgcattatagaatcttcatcggtatgtggccgcattaaaagactagaacattaacccacaggttcttttccagaganaccaattgttactttgctgtatctata

SEQ ID NO: 883 - DNA, 424 bp, Lilium asiatic
  unsure (1)..(424): unsure at all n locations
  Clone ID: LIB3229-018-P1-K1-E4
ctncnnccgcgtccggacatatatgtcagatgaaggaccatctgcatcagttgcatttggagcacttgaagctgatcactgaaacagagctggctcgaggtgctagtgaagaactgcggtcgcgggttagggagcttgaagatgaagtggaaaaacatagggtggcggccttggacagtgctgaggggaagagggaggcaataaggcagctttgcatctccttagaacattaccgcgatggatattatcatctgcgtcaggtgctgcaggggcataatcggactgcggttaccgccagttgatctctttgtaggttatgttgatgcacttgatgcaagatgtgggttgtagaatcatagttctttggtgtaattgggtagaatgattctgagtggtatcttaccagccaccaggcattcaaatc

SEQ ID NO: 884 - DNA, 216 bp, Lilium asiatic
  unsure (1)..(216): unsure at all n locations
  Clone ID: LIB3229-018-P1-K1-E5
naatcctgcctttcgtttttctttacgagaggtcacaaaacagcactaaaacgtatgtttcagaaacttcttaccagaacctgatgttccatctttaggatttattcagcatatgcctgcttttatatatatgtcaatggcagaagttgaagacattttatctgtaatccgtggataatcactgaatcacatcaataaaaactttttgtttggttc

SEQ ID NO: 885 - DNA, 429 bp, Lilium asiatic
  unsure (1)..(429): unsure at all n locations
  Clone ID: LIB3229-018-P1-K1-E6
nncacgcgtccgcaagaactatggcatctggctgaggtaccagagcaggactgggtaccacaatatgtacaaggagtaccgagacaccacactcaatggtggtgtcgagcagatgtacaccgaaatggcgtcacgccaccgtgtcaggttcccatgcatccagataatcaagacggccaccatccctgccaagctctgcaagcgtgaaagcactaagcagttccatgactcgaagataaagttccccctcgtcttcaagaaggttaggccccctagcaggaagctgaagaccaccttcaaggcgtctcgtcccaacctcttcatgtagaagggatttgaatgtgttgccaaaatgtcttgtttttatgaggattntcgttagattatgtttctggtttggtggattatatgatattgttttgggattat

SEQ ID NO: 886 - DNA, 361 bp, Lilium asiatic
  Clone ID: LIB3229-018-P1-K1-E7
accggcgaagaagaaggcggcgactccagcgaaggggaagtccccggcgagaaaggcgcctgcaaggaaggcggccaagaagtaggcttttgattcgtgattctgatggcagctggctgtaaattggctgatgtttgagggggcatgtgcgtcgttggcatgcgaagtaggttttcctgttgggtttttaggttaatttgtgtactctctccccccacctaaactcgtttcttttatatattagttgtttggttttcagtgtcgatctgatcgtttgagacattatctagctgtaatttgggtactatgtggtcccctgcgtcgtctttatttgatggttataatggagtatttgttagaa

SEQ ID NO: 887 - DNA, 379 bp, Lilium asiatic
  Clone ID: LIB3229-018-P1-K1-E8
ccgcccacgcgtccgtccaaatctcaatgtgaatgagcttatcaaggctttttctgtgaaaaccaatgacatgatgctggtcatatacctatcttccctcatacgcagcgtcatcgctctacacaatttgattaacaacaaaatgttgaacaaggagcacgaaaaagccgaagatgctacacctgtggccattgcaactgctagtggaagctagatgatgtgattacttgttttgagatgatgtggagctgcaatgttaaacgatgtgatatcgcatcaatcttgattatcatcaccttggaattgttcgtctgtaggatttatttcatcttttacccctggtgttggagtttatattgttgagtttggtagggataaa

SEQ ID NO: 888 - DNA, 430 bp, Lilium asiatic
  unsure (1)..(430): unsure at all n locations
  Clone ID: LIB3229-018-P1-K1-E9
nccgcccacgcgtccgcccacgcgtccgcggacgcgtgggtttgacaccaaggggcgtgttcgtctccactctatcaaggatgaagagggaaagttcaagctctgtaaggttagatctgtgcagtttgggcagaaaggcatcccctacctcaacacctatgatggtcgaaccatccgctaccccgaccccctcatcaaagctaatgacactatcaagcttgatttggagaccaacaagattgtcgacttcatcaagtttgatgttggtaatgtggtgatggttactggtgggaggaacactggacgtgtcggcatgatcaagaacagggagatgcataagggcagctttgagaccattcatgtccaagatgctactggccacgagtttgctactcgtcttggaatgtctttaccattggcaagggaacta

SEQ ID NO: 889 - DNA, 257 bp, Lilium asiatic
  Clone ID: LIB3229-018-P1-K1-F10
ccgaagagatacttatttgtcaaacagattatctttaagatggttgggagacaatctgattaaatcccgaaagagcagttggaatgatgttgataactcatctagtgcatgtgacatgtttccttccaacctttgtgaacggataaacacctttttgtcaacagttgctgctgtcaactgttctgggtttttagtgccccttttctgttgaccgtggatgtccaaatttgcaaatatttttgaaattgatttattct

SEQ ID NO: 890 - DNA, 417 bp, Lilium asiatic
  Clone ID: LIB3229-018-P1-K1-F11
cccggtcctccacgaggaggatggggtcgttgctgaggtcctccgccaagctgagggcaaaggtcggaggaggagccaacgggtcaagggccaccagctggttccgcttcggcggtaaggacgcggagggtgccggcatctatggcagccagtcccgggacgattttgatcgggacgacgtcgaacagtatttcaattatatgggaatgcttgcagtcgagggtacatatgataagatggaagcacttttgaatcagaacattcacccggtggatatcttgttgctgttggcatcatcagagggcgatataccgaaaatcgaggagttgttgagagctggtgcaaactatactatcaaagatgcagaaggaaggacagctttagaaagagcagccagcgaggagatcaagcagttca

SEQ ID NO: 891 - DNA, 389 bp, Lilium asiatic
  Clone ID: LIB3229-018-P1-K1-F12
cccccgcgagagcgagctagcaagcagtcggttgatcagagctcggaggcccgaagatgagggcgaagtggaagaagaagcgtatgaggaggctcaagaggaagcgccgaaagatgaggcagcgatcaaagtaagtgtctttatgtgatgatggcaaccttcatcaattttgctcgcatgttctggagatcctgtgatccagtctctcctggtgtgagtgtgtggtggtactggtgtagccttttatcttgtgttatgtagggtctgttttgcacctttataaacctttctatgtggcaggaagtttgtcttttttatgttccaaccgtcttgtttgtttgatacaatgttattgaaagttatttcaattctgaaggttttgttgaatt

SEQ ID NO: 892 - DNA, 426 bp, Lilium asiatic
  Clone ID: LIB3229-018-P1-K1-F4
cacaccacagcgatctagcaatgtcgggacgaggcaagggagggaaggggctgggcaagggcggcgccaagcgccaccgcaaggtcctgcgggacaacatccagggcatcaccaagcctgccatccgccgcctcgcccgccgcggcggcgtcaagaggatcagcggtctcatctacgaggagacccgcggggtgttgaagatctttctggagaacgtcatccgtgatgctgtgacctacaccgagcacgcccggcggaagacggtgacggcgatggatgttgtctatgcgctcaagaggcagggaaggacgctgtacggcttcggcggctgagatgtcaaggtccgggctgaaggaatgtgtttagttgctgttgctctcgtctgatctaggtctagggttttagatagagttcccgtatctttta

SEQ ID NO: 893 - DNA, 370 bp, Lilium asiatic
  Clone ID: LIB3229-018-P1-K1-F6
ctctttcttgctacgttttttttcaccagcactgaaatccattaaaaagatatgcacgcataacagctgaatagatgacaaacgaagacaactgcatatattgtttaaagcctacccccacaacgcaaattctgaccgcccagtacagaaaaccattaacacccccttttgaattttacaatcaaaaagctctaattcaaattcaccacctactggaccttacaacacgccctttaagctttctttggcgtgttggtggctttcttgggagacttgggagtcttcttgggagattttgttgcaacagaatcacccttcttaagagttttcttggggagcaagcaccggttgatgttggggatgacacccc

SEQ ID NO: 894 - DNA, 304 bp, Lilium asiatic
  Clone ID: LIB3229-018-P1-K1-F8
cccacgcgtgcggaccatcattgatacattggatacgattgtgttagatggatcggtccgattggtctgggggttcaaagcaggaggtgcatagcttgcttttacattgacggtccaggactgcatttcctttgcgaagggtagagtgaaggagctaaatagtatattggaggaattctgttcagacatgaaggaagatgaataggaattgttagttggagatcgtttgtttttcattggccgatagaagctcaattgattagagtaatgtaagcattgtaaactaatttactagataagtgaa

SEQ ID NO: 895 - DNA, 424 bp, Lilium asiatic
  Clone ID: LIB3229-018-P1-K1-G12
ccgcccacgcgtccgatttatttttggtattgtcttgggcttattgcttatattttgtaggggttacttttatcatggcttactccatctcattcaaatatactatatagataagtttaatgtcatggtaaagaagaaggatttgaccaatgctatattataatatacaacttgagattagatcatgtaactagaggatgagaatagataagtgatagaggatatgtctattatccaatattatatgataaaactggagaggacctggactaagttaaggataactttttctcttacaagagtggaggaggctcgagccattattgataatactactatatagatagagaaggagcatgttatatacatattttggcaaattaaaaattatctagagaaggatttggattgggataggtgctac

SEQ ID NO: 896 - DNA, 278 bp, Lilium asiatic
  unsure (1)..(278): unsure at all n locations
  Clone ID: LIB3229-018-P1-K1-G3
nnnnnnntttctttctcgaagctgcggtttgtgaagtccttctctgcatttttcttgggttgtgacctttcttggtcatttgggtctggacagggttagtctgctggaatctttgttaaactgtctttagagtcctgttttctcacgtttcttggtcatttggttctggagggttagtctgctcgaatctttgttcgactgtctaagattcgactgtctttagagcctgttggggtttgcttactttaatatttaagaaaacattagaactttgattt

SEQ ID NO: 897 - DNA, 374 bp, Lilium asiatic
  unsure (1)..(374): unsure at all n locations
  Clone ID: LIB3229-018-P1-K1-G4
ncaacgcgtgggcaaatccgaaaccgcaatgcggcgcatacctagcgccctgctgaggagtggctaaagagtctgggaggccgccctaagaatcggggtcgaagatgtgctacgccacaaccttactgaagaagtcacgattgggactcgcaatgagcgcgggcccccttcggaggctaacttgaggaggagtaggagggttgttgcggaatcacgctaaacgcggatttcaagaaccagtatcgagcacctaaccggaggggagcgacaggaggtgggaccatggcgaaccacctgcgtaaagtctagggcgaagactgtactcgaccgaacggcctaaccaaactaaactggccccttctcgacactccgaa

SEQ ID NO: 898 - DNA, 421 bp, Lilium asiatic
  Clone ID: LIB3229-018-P1-K1-G6
cttacagccatggcggaccacctccgttccctccgcctacttcgccaccgcgggcagcctatctccggccgactggcggtgacttcttccaccacctcgtcgatggtgacgtcgacaacgacgtccactcctctaccacccactacctcctatatccttcgacaacgacggccatgaagccgtccacttctacgtctccacgacagcatcgcctctacgatggcgaccaccactagtccttccaccgacggctgagatcggatccagtgcatgcagcgcccagagccgtctgatgctgaaggaagagtccagaagcagatcaccaccctccaaattcgaatgagaagatgagagccatcgatgaagaagaccgttacagatccagagcccagtccctccgttttgctaatcaggtaaagtt

SEQ ID NO: 899 - DNA, 415 bp, Lilium asiatic
  unsure (1)..(415): unsure at all n locations
  Clone ID: LIB3229-018-P1-K1-G9
ctcgctaagctttcaagctcaagtgccgaattgtgcgacattgcctcgccggagatgtgagcgatgaagaaataccatatgtagcactgtgatttggaaatctattttagtgaatgggaattattgtttttttctcttccctttcttttctttttgagaagtagtttctatgtataaagttctaggggagatcatgccggattttaatgtttcaccttcttctccagaagatatgaagaacgtggttccattttatgttttcaattgattcagcaaagcctactctcctgatttccttacctgatcaatgctagatatgaggctctaaaatctttttctggcggtcacccagtatacattgagaattttttttagagggncagtatatacttagagcatcttttacagaggacac

SEQ ID NO: 900 - DNA, 126 bp, Lilium asiatic
  unsure (1)..(126): unsure at all n locations
  Clone ID: LIB3229-018-P1-K1-H1
cccgtcgcccacctcnctagatcgagcggccgtctagagatccaagctactacctgctgcgacgtctacttttagtggtgactaaattaataactgtcgcgtatacacgacaactggaaacctgcg

SEQ ID NO: 901 - DNA, 389 bp, Lilium asiatic
  unsure (1)..(389): unsure at all n locations
  Clone ID: LIB3229-018-P1-K1-H10
ggttggggacctttcagaggagggtcctgttgatgttgacggaatggatgcttcagcggcacatgttgcgtatctgttgtctactgaacctgctgacattaaacttggtatcggtggcttcagcatgggtgctgcaattgctctatactctgcgacttgttttgctcatggaaactatggaaatggcaattcttatccagttaatctaagtgcagtggttggtctaagtggctggcttccatgtgccaggagcttgaagaacaagttggatggttcacaggatgcttcaagaagggctgctgaattaccgattntgctctgtcatggaaaaggagatgaggtgatcctctacaaacatggagacaaatcagctgaggttttgagatcta

SEQ ID NO: 902 - DNA, 388 bp, Lilium asiatic
  Clone ID: LIB3229-018-P1-K1-H11
ggacgctgcagcaattctgacatctattcagtctctcctctgcgacccgaatcccaactcccctgcaaacgtggtgaggcagctcggatgttcactgagaacaagcgcgactacaaccgacgtgttcgtgaggtagtcgagcagagctggacggccgactaaagtcatttaattgcctatcctgcaacagggagaatgcagtataggtcgtgactgaaatgtatctgtaaaatgacaccttatatgcataacttataaggtttgaatgtgtgaggttgttactggtgctgctgtacattgtttagctgcatgggttgatcttccatttcttcgtgtaaccatgatttgtctcaggaactgtcgtttatataaaacatatatttctagt

SEQ ID NO: 903 - DNA, 315 bp, Lilium asiatic
  Clone ID: LIB3229-018-P1-K1-H12
gcaatacttcacgaaggagattgaactccaagtgcatcaagagggcttccactcgtgaaatcaaggagtgggtgggttgtcggatacttaagaaggagagagctgcacgggtggtttcagagagagcactatcttcgtcctccttgagctgtctcactgaggttttcgagcatagtgatggagaggatgatagcatcaatagtgcttcaactcaatgtggacggaagggttagggtgttttaattctacttttaactttttttttctgtatcaatatcagttcagtttcttctggtagtaaattttatcagtgcc

SEQ ID NO: 904 - DNA, 413 bp, Lilium asiatic
  unsure (1)..(413): unsure at all n locations
  Clone ID: LIB3229-018-P1-K1-H5
cgggccgacccacccttccnnaacgcgtggggcctactcaccgggctgactaacgttgatgccgcactctgcgtctgcactgcactgaaggccggtgggctcggcatcggcacctttggcccgcttgatttaacccggttttggaataacgggggcaggaggtcaccaaaggggttccagtgtgctaagatctttgagatgggacgatggttagtttaattgttggttagaatttgttgttggcgttaattggtattaaaataggtcaaaattcaccactgcagaaggccaaaggtgaaaaatctatcacctgagttcctttctatgtaagcaaagattgattgttgggtggttgtatatatttattatttgaaatttggttttttaatgagaattgtgattattttggaatt

SEQ ID NO: 905 - DNA, 351 bp, Lilium asiatic
  unsure (1)..(351): unsure at all n locations
  Clone ID: LIB3229-018-P1-K1-H6
nnnnagcgtgggtggggtccttgctctgctttcagtggcgttcgcagttgtggcggatctgtgccatcagcaccagggccggtgcagagcagttgcgcagccaagaggacgacaactacgtaggaatcaacaaggggatccagccgtgctgtaaccagtgtggtgtctgcacgaagtcctttcctccactgtgcacctgccatgatgagatgtatatctgcccatcctggtgcaagaactgcatgatgtcgccgaagttgatctatccgccgctatacatttgtcaggatctcattgtcaactactgcgatcacaactggggcttgggaggcggagctgccacatctgagt

SEQ ID NO: 906 - DNA, 360 bp, Lilium asiatic
  Clone ID: LIB3229-018-P1-K1-H7
cccccgcccacgcgtccgggaaaattcagcaaatgatagtgaaagacaagataaagctccgatcgtatttgtccagtgaagcccattctctattgaaagggttgttgcagaaggaagcaagcaggcgccttggtagcggacccggtggtagtaatgagataaagagtcacaagtggttcaaatcgatcaattggaggaaactggaagctcgggaaattcagccaagcttcaagcctaacgtttctggccagaactgcattgccaactttgatgagtgctggaccaagatgtcgttgctggattctcctgtcgccagtccaggcgcggatgactgtactttcacaggatttacctatgtga

SEQ ID NO: 907 - DNA, 424 bp, Lilium asiatic
  unsure (1)..(424): unsure at all n locations
  Clone ID: LIB3229-018-P1-K1-H8
ccccgtcttgaactgctattggactaaattgattgtttgcaacggctatttgattgtgcattaataaatcactgaacgggcacggtctcaggcgcgagaaagcgggcgagatttcatcactcgtccgtatccccaaacaacatttcacgcatataaaaaaacacttaagggcttacccggagggggtgggatttcatcacccatcctcagcccaagaacaaccaccttacattcacacggagcccaatttgatagggttgataactgatcggggtcttggaaagccctgcgtgtcatcgggtcaatcacggattcttacagctatccttcgaattgaggagataggggtcgtaaatagccattaacacggctatacctccnctcactagggatagttggtctgtggtttttctggatacgtgca

SEQ ID NO: 908 - DNA, 286 bp, Lilium asiatic
  Clone ID: LIB3229-019-P1-K1-A10
cgctcgctgaaaccctagacaaccggtttcgtcatgggtaaggtgcacggatccttggcccgagccggaaaggtgaggggccagacgcccaaggtcgctaagcaggacaagaagaagaagccgaggggccgagctcataagcgcatgcagtacaatcgccgcttcgtaaccgctgtcgttggattcggaaagaagcggggcccgaactcgtccgagaagtagagattgaggcctggaaccgtgattttaagattctcgtctttaggtttttggtttaaatttttat

SEQ ID NO: 909 - DNA, 347 bp, Lilium asiatic
  Clone ID: LIB3229-019-P1-K1-A12
ccttaccgtctcagccatgttccgtggtaagatgagcacgaaggaggtggacgaacagatgctgaatgtgcagaacaagaactcatcctacttcgttgagtggatcccgaacaatgttaagtcgaccgtgtgcgacatcccgccaattgggttgaagatggcggcgacgtttattgggaactcgacttcgattcaggagatgtttcagcgggtgagcgagcaatttacggctatgtttaggaggaaggcctttctgcattggtataccggtgaggggatggatgagatgaattcacggaggccgagagtaacatgaatgatcttgttttagagtatcagcagtacca

SEQ ID NO: 910 - DNA, 396 bp, Lilium asiatic
  Clone ID: LIB3229-019-P1-K1-A2
gggaccggaatttcggcctaggcccacgcgttcgcatctagaggacagagctggcactcaaatcaatgcaagactttcttcgactgctgatgctgttgtattaaatgagggctcaatcgagccggcttcctcttttacccaagttactgttggcatagctgattgcaaggagactggaggctcagctcttgagaatagagatcaaatcaacattaacgaagcggctgaaacagatgctttactgaagcaggatgatttgtccgctgttactgatccaacagttgattcgaaattgggacagtaatgcctgggatgtgtgttactgtggtacctgcaaagtctgagttaagttatagctttcaaaatcagcactgctcatcttgatgtcaatagaca

SEQ ID NO: 911 - DNA, 303 bp, Lilium asiatic
  Clone ID: LIB3229-019-P1-K1-A3
aaaaaaaaaaaaaaaacaaaaacaaaatctcatttcaaaaccaacacacacaaaaacagacaggtgcaaaaaaaaaaaaaaaaggggaaaaaaaaaaccaaaaaaacaaaaatacccaaaaaacaagaaaaaataacgggccggcccctatacagaacccaaacttacttccccccccatcccacttcaaaattctcttattgggcccccaaaaatacaatcccgcccccgccttaaccaccccctgctcctgaaaacccccgccattccccaactaaacagcctttaaacacaacccccttt

SEQ ID NO: 912 - DNA, 406 bp, Lilium asiatic
  Clone ID: LIB3229-019-P1-K1-A4
ctagatctcaattctccttcgttctttctccatggctcgcaccaagcagaccgcccgcaagtccaccggcggcaaggctcctcgcaagcagctcgccaccaaggcggcgcggaagtcggcgccggccaccggcggcgtgaagaagccccaccgcttccgccccggcacggtggcgctgcgggagatccgcaagtaccagaagagcactgagctcctgatccgcaagctccccttccagcgcctggtgagggagattgctcaggacttcaaggctgacctccgcttccagagctccgtgtctcagcgcttcaggaggcctcggaggcatacttggtgggactgttcgaggacactaacctgtgcgccattcacgccaagcgcgtcaccatcatgcccaaagacattc

SEQ ID NO: 913 - DNA, 429 bp, Lilium asiatic
  unsure (1)..(429): unsure at all n locations
  Clone ID: LIB3229-019-P1-K1-A5
cgaacggaagtccgccgcgcgtccgaggacgcgtggggatcaatcccttcaatttatttttaggatccatgagctcaaaggcttaggtatttttagtcatcaaaggggattttcaanaacgggtgaagtatatttgagtttgatacgatttttcgttagcggatactgggtctctatctccgaggtgtgcatagaatattcctcgccctattgacctcatcgtaatttattttgattcttatagacatcttgaggatatgcgaagataaatcagttctatggtttatattttgtcgaattaccgtaaaatcgttgtggtagctattgggagtttgagctaattttcctatgtatagaatcatgtgcccttatctaggttgaggtatgcaaattatgatgtagaaaaggctcatatcactgacacttgca

SEQ ID NO: 914 - DNA, 166 bp, Lilium asiatic
  Clone ID: LIB3229-019-P1-K1-A6
gggggcatgtgcgtcgttggcatgcgatgtaggttttcctgtcgggcttttaggttgatttgtgtactctctccccccacctaaactcgtttcttttatatattagttgtttggttttcagtgtcgatctgatcgtttgagacattatctagctgtaatttgggta

SEQ ID NO: 915 - DNA, 256 bp, Lilium asiatic
  Clone ID: LIB3229-019-P1-K1-A8
cgtctagtaccccaacttcaaacttgttctagtcggtgatggcggcacagggaagtcgacattcgtcaaacgtcatgtgactggtgaattcgagaagaaatatgaaccaactattggtgttgaggtgcatcctctggatttcttcaccaattgcgggaagatcaggtattactgctgtgacactgcttgtcatgaaaaagttggtgggctgcgcgatggctattacatgcatggaagggtgcaatcataatgtttg

SEQ ID NO: 916 - DNA, 292 bp, Lilium asiatic
  Clone ID: LIB3229-019-P1-K1-A9
gccggagcggcggcaacagtggcggtggaaccctagacctgggctctgataccaagttaagaagaataggtatgagaggaaatgtgggttattatttcattgccctcttgggggggtatttataggacagcagtccaccctgctacagctgtgtagcccacactgctacagctttgtagcccacactttagcccacaatgctccagctgtagccctactttagtccacattgctacaataagcagtccacaatgctacagtacaattgtgtatattaacactttgcaacgac

SEQ ID NO: 917 - DNA, 341 bp, Lilium asiatic
  Clone ID: LIB3229-019-P1-K1-B1
gttggagcgaaggaggataggatgatgatgactgggatgcacactgttgctgacatattctgtgttggatgcgggtcgagcgtaggttggaaatatgagtctgcgcatgagaagagtcagaagtataaggaaggaaagttcattctcgagaggttcaaagtgatggggccggatggaagccggtactgggtggctcatgatacacatgtcggtgggagcgacccgaatgatgcctgattctcgatatggtggaatgccctacgcttgatatgcatgatcagtcgtttaactgctattgtggcctcaccattatttgtcttttatgctttttatgctcgtat

SEQ ID NO: 918 - DNA, 315 bp, Lilium asiatic
  unsure (1)..(315): unsure at all n locations
  Clone ID: LIB3229-019-P1-K1-B10
ataaattatccctttgagaaggtcccattgagcccccggtttcgnggagaacatggtgttcatcgttatggggcgcggggaggagcactncatttcttgcaagctgtgtgaagctatatgcccagcacaagcaatcactattgaagcagaggaaagagaagatggcagtcgccgtactacaaggtttgacatcgacatgacaaaatgcatatactgtgggatctgtcaggaggcatgccctgtggatgctataggtgaaggccctaatgttgagtttgcgacagaatctcagaggagttgctgtaccacatggag

SEQ ID NO: 919 - DNA, 403 bp, Lilium asiatic
  Clone ID: LIB3229-019-P1-K1-B12
cggacgcgtgggaattcccaagagaatacacaacaagaaaacagaaagagcttgaaaaagttaatcagcaggacaactcatcatcaagtttttcacaagaatcttcttctcaggccaagaaaagcaatgtcgggctcgatgtcgaccccttgattactcattatagagttggctgtgattcatgtgggatgtatcctatagttgggaagaggtacagatgtaaagactgcaaagagctgataggcttcgacctttgtgaagcatgctacaatttgagctcgaagcgccctgtcgattcaatcagcaacacactcctgatcacgagtttgagctcgacaactcgatgatatatcagaaaatattgaggtctaaagcagtgcaacgggttcttgcctatgtcaat

SEQ ID NO: 920 - DNA, 353 bp, Lilium asiatic
  Clone ID: LIB3229-019-P1-K1-B2
cttcagtcatgtcaggccgtggcaagggagggaaggggctcggcaagggcggcgccaagcgccaccggaaggtgctgcgggacaacatccagggcatcaccaagccggcaatccgccgcctggctcggcggggcggagtgaagaggatcagcggcctcatctacgaggagaccaggggtgtgctgaagatatttctggagaacgtcatccgcgatgctgtcacctacactgagcacgcgcgccgcaagacggtgacggctatggatgttgtgtatgctctcaagcgccagggccgactctctatggctttgggggttgatgatgtagtgttctgttctaaatctatgtttgtt

SEQ ID NO: 921 - DNA, 337 bp, Lilium asiatic
  Clone ID: LIB3229-019-P1-K1-B3
cggacgcgtggggttaaatgctcatccccaaatgaacactccagcttgtaatgagggatgaagctgccctgttctcatcaaacgcccgatggagagtgtggggcttacagaccaactatataaggctgccttgatccttatcagcgatgaattgggggctccaatcagaatgcaaaaaatttgttactagtgatatgatatataactcttgtattatgtatctgtgttgtattgtgctttaggtttgtgcctctattctattgtataaacagtatgtagtgttatattctacgtctattttttttttgtttgggttaatgtagcttttgaatgattt

SEQ ID NO: 922 - DNA, 298 bp, Lilium asiatic
  unsure (1)..(298): unsure at all n locations
  Clone ID: LIB3229-019-P1-K1-B4
cccacgcgttnttttaaatgttcatgtttatatattcactccacctagnaancacggaggtgtctcccctgatgtgatgagacgccctacananaatnaccaacttacataccaaccatataaatctgccttgatccttataaacgatcaaattggtttctttcaatcagaaacccaaaaaatttcgtcacctagttatatgatataataaatcttcaattattgtatccagacacttattgctctctttattagtacctccattctatattttaaaccgcatgaagtgatatattat

SEQ ID NO: 923 - DNA, 60 bp, Lilium asiatic
  unsure (1)..(60): unsure at all n locations
  Clone ID: LIB3229-019-P1-K1-B5
gggggacccacgcgtccgcccacgcatntttattaaaggtcatctttattttttcactcc

SEQ ID NO: 924 - DNA, 245 bp, Lilium asiatic
  Clone ID: LIB3229-019-P1-K1-B6
gggggggaaaagaaaaacacaattaatttaggattcaatgatcccatattgggaagatgaaaataatatccactgaaatacttctaaacgacaatggaaatcgaaagcagataaagtttacattagaaatcgaaagcggataaagtttccctttgacaaaatccagttgattgactttactttttctcatcaaatgcaacaaagcgatcccaattggaccgggcttgtgttccatcgtctttaaa

SEQ ID NO: 925 - DNA, 277 bp, Lilium asiatic
  Clone ID: LIB3229-019-P1-K1-B9
ataaattatccctttgagaagggcccactgagcccccggtttcgtggagaacatgctcttcggcgttatccaaccggagaggagcgctgcattgcttgcaagctgggtgaaagctatatgcccagcacaggcaatcactattgaagcaaaggaaagagaaattggcggcggccgacctccagggatggccttgacatggccaaatgcatttaccgggggttctggcaagaggcatgccctggggatgctataggttgaaggccctaattttgggttg

SEQ ID NO: 926 - DNA, 334 bp, Lilium asiatic
  unsure (1)..(334): unsure at all n locations
  Clone ID: LIB3229-019-P1-K1-C1
tccggggaattgttaaatctaaaattttctttttttttaccacatacnaaacaagattgttggtgaaaacttgtggggggattcnctaacaccangcacttcatcttcttatcaacattttaccattagcttctttctttaaacctcaaagatagttacattttctcttactggcccatgctttataagaacatctaacctaactcaatttattgtgatttactttccttgtacatcgcttaaaattgttcctttctaatgtattaaaaaattcttatttaaaaaataaaaaaaaaaagtatagcccctctcttttcataattcaaatctttta

SEQ ID NO: 927 - DNA, 382 bp, Lilium asiatic
  Clone ID: LIB3229-019-P1-K1-C10
aatcaatcccctcaatcatcgtctctcgctctcagcaatggccggacgtggcaaggcggtcggctccgcagcggcgaagaaggcgacctcgaggagcagcaaggccggtctccagttcccggtcggccgtatcgcccgcttcctcaaggccggcaagtacgccgagagggtcggcgccggcgctccggtctatctcgccgccgtcctggagtatctcgcagccgaggttttggagttggctgggaatgcggcgagggataacaagaagactaggattgtaccgaggcatttcagcttgctgtgaggaatgatgaggagctttcgaagttgctggggatggtgactattgctaatggtggggtgatgccgaacatccacaacc

SEQ ID NO: 928 - DNA, 151 bp, Lilium asiatic
  Clone ID: LIB3229-019-P1-K1-C11
attatttttccggggggaaaggtattaatttcttctggttgaggaagggagaaagggactgggttttattaaaccgatcatatttgggagggacctaaaagaaggaaaggggttagggcccttttaaaaaaggtgatttgatttcatatgg

SEQ ID NO: 929 - DNA, 389 bp, Lilium asiatic
  unsure (1)..(389): unsure at all n locations
  Clone ID: LIB3229-019-P1-K1-C2
cccacgcgtccgcccacgcgtccggttcaggatatatctatccagtcgcgccatgcaaggggtgtgattctgatgaggctagagcatgctgggaaaatccagtcagcttctttgatatctgcagcaacacctgaccttgatgtagaagaggaagccgaagaaacggttcatgcataaaagcgtgttgattcattgttacgtttctttttggttactgaggaatgaggcttatcagtttgggttccgtggttgaactgactcttcatctgagtgaccgctacggcttctggaagaattttggtccagacgtgtatagntttgtaaaatggggagagtagtagctaaatatttgtttactgacggtaaatagtgttgtaccatgtcggtta

SEQ ID NO: 930 - DNA, 405 bp, Lilium asiatic
  Clone ID: LIB3229-019-P1-K1-C3
aaagagaagacctagagagagaaagatggagaggagcactccggtaaggaagccgcacacctcgacggcggatctgctcacctggtcggagaccccgccggccgatccgccggcgccggtggcgtcaggatcgcgatctctcaagccggccagcaggatcagcgcggtgatgtttggggcccagcctaccgaggaggaggctgagagcttgaacctgaggaaaccttgttcaggctcgaagctgagggagataactggcagtggtatctttgcagcagacaatgacaatggtgctctgagtctggtagtgttttctcaactccaaataacaagacaggtttacgaatctatcagcaagcagtcggtggaattagccagatctctttcagtgccgatgagagtgtt

SEQ ID NO: 931 - DNA, 211 bp, Lilium asiatic
  Clone ID: LIB3229-019-P1-K1-C4
cgacctccgaggagcagcacaggccggtctccagttcccggtcggccgtatctcccgcttcctcaaggccggcaagtacgtttgagtttttgtgcccatgactacctcgtctatctctccgccgtcctggagtatcttacaaccgatgtttttgagatctctgggaatgcactgagggattacaagaagactaggattgttccgaggcata

SEQ ID NO: 932 - DNA, 464 bp, Lilium asiatic
  unsure (1)..(464): unsure at all n locations
  Clone ID: LIB3229-019-P1-K1-C5
tcgtcggaccgcgnntggggtgagggggatgnnnagatattagtcgacgaaaatcagannatccgaatcttgaagcgtgtaagaaccataccatcatgccgtagacccttcatnaaaactgtcaatataacaaacatatgcaaagccccttctcgaagaaggctttgatganntatcgcctggcccagaagaattgtggattgggtccacancaacctagatatcagttatgacccaagcacanaagagatcgacgtcaatgatgaccctggcaccgtgtagctcgctattctacatcccaggcacctcgatggtaccccgtcatggcattcgagaaagctgcaaggctatggggatacccatttctaagacctccagattactaatgctgagatggtaaagaccgatacccacatgttgaaggtgaaaggcaggctcttgtcggagaagaagaggatcgagga

SEQ ID NO: 933 - DNA, 276 bp, Lilium asiatic
  Clone ID: LIB3229-019-P1-K1-C7
ggggaattggaaaagctggaatgactctttgttgaccatatatgaaacaatattcgtgggggaaaacttggtggtttattcgctaacacctggcactgcatcgtgttatcgacattataccattagcttctttcgataatcctcaaagtttgttacattgtctcggactggccgatgctttagaagaacatcgaactcaactcaatttatcgtgatttactttctgtgtacatgggttaatattgtttcttttgaatgtattaagatgttgttatt

SEQ ID NO: 934 - DNA, 137 bp, Lilium asiatic
  unsure (1)..(137): unsure at all n locations
  Clone ID: LIB3229-019-P1-K1-C8
cacgtcgnntccggttctagtatgcgctgggcgtgccgcttctagtaggtatccaagacttactgtaccgcggttcatgtcggacgtcatagctttcttctatgagtgtnncacctacaattcaattccactgtgcg

SEQ ID NO: 935 - DNA, 75 bp, Lilium asiatic
  Clone ID: LIB3229-019-P1-K1-C9
attctattttatccacgcttacttacacaagcatgtgtcgtaatacctgttgtatggtgccacctaaactcaatc

SEQ ID NO: 936 - DNA, 375 bp, Lilium asiatic
  unsure (1)..(375): unsure at all n locations
  Clone ID: LIB3229-019-P1-K1-D1
ctgctatagcattaaacatggtttatacaaatcttttggnnncaacagctgttaaacagttgatagtgtggactgatcctgctttaagcttgaaggtggtcgatcaaatgcttcggctaggttgggaaggcgatgggctactccgttgatgtcatcgtagttgagctgtgttctattcagtgaaaggaacgcgtactctttttgcccttgccaactgcgaccagccctaaaacgttgacaaaaagttttgattggcgcttacgtgtatcatatttgtcttggaccagaaaaatatataccggtgagaggtgtggagttttccaatggatcccctttttatgttgctatgtaaatataattattgcttttatatac

SEQ ID NO: 937 - DNA, 331 bp, Lilium asiatic
  Clone ID: LIB3229-019-P1-K1-D10
gtttctggcagcccctctactgcccctctcgttatagaagttatattggcgtgctgtgtaagagtttcaaagattatgggacagtctttatatctctcttgtgttaatctatattacctttttctgaataattggctgacagttcttgaccataccaccccttttcgtgagtagaaaactcatgagattgaattctaagtgttaatttttttgttgttatcgggttggttacaaagatgcgcgaaatggggcgtgctgctgcttgttccaagcttttcgactgtgtcatgtgatcggacaaatatagaatggagtcttaactttttctctc

SEQ ID NO: 938 - DNA, 402 bp, Lilium asiatic
  Clone ID: LIB3229-019-P1-K1-D2
cttgtttgttccctgtactcccaaaggttgtattgaattgttgcacaggtatggtatcgagataagcgggaagagagctgttgtaattggccgtagcaatattgtagggactcccgcagcattgttgttacagagaagaaatgcaaccatcagcattgtgcactcattcaccaagaatccagaggaaattacaagacaagcagatattgttatatcagctgttggagtagctaacttggtgagaggtagctggttgaagcctggtgcagttgtgattgacgtgggaataaatcggtggatgatgttgaaagtccccgaggttaccggctggtcggagatgtctgttacgaagaggcttgcaaggtagcgtcggcaattacccctgttcccggtggagttggt

SEQ ID NO: 939 - DNA, 399 bp, Lilium asiatic
  Clone ID: LIB3229-019-P1-K1-D6
aatgctcattattccggtggttatcgtcctgatcatcatgtaattgagatgttctgggatgttctcaaaagcttttgtgtggagtaccagaagaaatttctgaagtttgttacaggatgttctcgaggaccacttcttggattcaagtatcttgaacccaaattctgtatacagagggctgcaccacttcaacctagtgaagacgaccttaatcggttaccaacttcagcaacttgcatgaacctactaaagctcccaccttatagaagcaaagaacaaatgcagaccaagtgatgtatgcaataagtgcagaagctggcttcgacttgagctgagggtcctttcttcgattttttttttgaaactatggcctgtacagccattcaaatgcccccaggg

SEQ ID NO: 940 - DNA, 344 bp, Lilium asiatic
  Clone ID: LIB3229-019-P1-K1-D7
ctagcccaacaataccaccgttctgttttctatcctatcaccgccgaccaacgttggagaattactaaggatgcgggtacacgcgccaccacgactttctccactccaacccgcactgactctaccacaattataacgggtactgctgcttctacggcctcacctgaggaaaccgatacatgtgccaactatctaaccatttcaactgacatgataaagtcatgatgtctcgagcactatcattggaagaaagccaggcagtagaaccagccttatcaattcaagtggaaacccacattatcaaggaagcgcgcgagtcttactacatacaactgggccgttta

SEQ ID NO: 941 - DNA, 365 bp, Lilium asiatic
  Clone ID: LIB3229-019-P1-K1-D8
aaaaaaaattaatcctaatttttttgttcctgaccatatactatctcatcgccgtcttagagagttgagaattctaatttgtttcaatttctggaattggaatgatatagataaaactctacaattttgcaacgaaaacaaaataataaactgtggacaattttttaatgaggacaagcatcttaatagagatgcaaacaactttattaaattaaaattatttctttggcctaattaccgattagaggatttagcttgtatgaatcgttactggtttgatacccaaacagcagttgttttagtatgtcaaggatatatatgtattcccaatccagaataagtttattaacctatatttttttttc

SEQ ID NO: 942 - DNA, 382 bp, Lilium asiatic
  Clone ID: LIB3229-019-P1-K1-D9
agaagcattgcgtctccaaatccaagtccagaagcaacttcatgaacagcttgagattcaaagaaagttgcagttaaggattgaagaacaagggaagtacctggagatgatgttcgagaaacaatgcaagtctggtgtcgacaagttatggacaccgtctgcccatgaggaacctccttcccaaacttcagatctagctcctacgaagaaggaaccctcggagaagcatcaagacgataaaggaaagcacccggcgaccgcgatactaatagaagacaactcccaaagccaggcaaggagcgaaggatgcgtgagcctggaaatgacagcgaggcgagcccttcgatagagtcgctgtcaccgtcgtgcaagcgagccaagg

SEQ ID NO: 943 - DNA, 377 bp, Lilium asiatic
  Clone ID: LIB3229-019-P1-K1-E10
gttggggatgctgttgatattgagagggagttcgtgtgcgatgcgctgccggtggcgcttgtggggatgaatggcgcgctgatgagtgagtacattgaatttgttgctgaccggctgctgggggcgttggggtgtgggaagatgtatggggcggcgaacccgtttgactggatggagctgatttcgctgcaagggaagacgaatttctttgagaagagggtgggggagtaccagaaggcgtcggtgatgtccagcatcaatggcaatggggggaatcatgtcttcaccttgatgatgatttctgagacttgcttgattggatgctggctttgatgcctctgctgccattgggtaagtttaagtttaaaattttgtta

SEQ ID NO: 944 - DNA, 399 bp, Lilium asiatic
  Clone ID: LIB3229-019-P1-K1-E12
ctgaagagaatatgcgagggatatgttttgaggtctgtgatgttgggctgcatgctgatgccatccacagaggaggtggccaggttattccaactgctagaagagttatttatgcctcacagttgacagcgaaacccaggctgctggaaccagtttacttggttgagatccaggctcctgagcaagctcttggaggaatttatggtgttctcaatcagaaaagggagcatgtgtttgaggagatgcagcgacctggtactcccctctacaacatcaaggcttatctgccgtcgttgagtcatttggtttttctggtgctttgagggcagagacatctggccaggccttccctcagtgtgtctttgatcactgggacatgctttcatacgacccactcga

SEQ ID NO: 945 - DNA, 318 bp, Lilium asiatic
  Clone ID: LIB3229-019-P1-K1-E2
cccgtttgttccagatctcgccgccgttgacagcgatggccggagggaacttccttgctagggctttgagctacgttgtcaacgaactggttgtcgagagccttgcgaatagccgatcatttcaaaggtttgctgtgaggacttccaaagctctggaagaaatgtctgtcaagggtggtaagacccagggaatctgttttttgagcagatgaaggatgcacctgaacgctttgttcgtcccagataagagtaaatgagctgttcatttgggtgccctttggggtcgctaagggggtactgggtaaaaattgatataag

SEQ ID NO: 946 - DNA, 315 bp, Lilium asiatic
  Clone ID: LIB3229-019-P1-K1-E3
acgcatgatcttattatatacttgtggtttgcccaattgcgatacgaagcctgcgggtaataagacggtgggggagacacctgccgtcgatgaggataagaaagctgccccagtctagaagaagccgtcggtgaaaaagcccaaggacgggtagaaggtcccggcctccaaggagggggggaagactatgaagaggtcgtctaatgtcttacgagatctacatgatctacatatttacggtgttaaagcagttccacatcaacatcgggatctccagtaaggccatgggtatatgaacagcttgatcaacgacct

SEQ ID NO: 947 - DNA, 300 bp, Lilium asiatic
  Clone ID: LIB3229-019-P1-K1-E7
ccacgcgtccgctccgacccacaaagcaaggaatggattcaatcctttcaaggaagaaagggaggcaaggaaaggggaaaattctcttcaaatttgattggattaatggggtcatcttgagctgctaataaatggcgtagagagaaagatgggactagatgcaggataaagagaatgaatgtatagagtgagcttctagttagaccaaatctggtatttatcttcttcttatttttatacttctgttttttttttgttcattttgatttccatttcataatatgattccttctagatttt

SEQ ID NO: 948 - DNA, 257 bp, Lilium asiatic
  Clone ID: LIB3229-019-P1-K1-E8
cccacgcgtccggcagagtgtgttcgttatatgcgatcttttaatgtgccggtgttgtctttttggaggggggggggatacaaatacccaacgttgctcgttgttgttgtattaaaacgcttttactttttgttgcgaaggttgtaaccaggttcccgaaccttacttcttcgggtgttttggtccaaactattcccttcatgttgcttcaaggtatattgagaacaattatttacaccaggtcttggattacatta

SEQ ID NO: 949 - DNA, 420 bp, Lilium asiatic
  Clone ID: LIB3229-019-P1-K1-E9
ggggcggcccacgcgtccgaaagattcttaggtctgaattgcaagctatgcgtgattgtgatcctgcaactgctcgtcattggattgtgaggaagacaagaactgtgaatcggactgggcagcttacaggatataagctcgtgcctggttcaaattgcctgcccatggctggcccagaggcaaaattcctgagaagagccgcctttttaaagcataatctttgggttacggcttacaatcatgatgagatgtaccctggaggtgaatttcccaatcaaaacccccgtgtaaatgaaggattagctactgggttaagaagaacagatccctcgaggaaactaacatcgttctctggtatgtatttggggttacccacattcctcggctcgaagattggcctgttatgcctgtggaacacat

SEQ ID NO: 950 - DNA, 405 bp, Lilium asiatic
  Clone ID: LIB3229-019-P1-K1-F1
gcgtccgatcctaatcaccaacgacgacggcatcttcgctttcggactccgctccatcgtgcaggcggtggtctccaccggccgctgcggcgtttttgtctccgcccccaattcggacaagtctggagtgagccactccttcacctggcggccggcgctctgttgcaagcgtgttgagatcgaaggggccacggctttttcggtcacaggaacccctgcagattgcgctgacttgggcatctccggcaaactttttgatggcgaagttcctgatctgttgatcaacgccatcaatattggagcaactgcggatattatattgtttactcaaggacagttgctggtgcacgggaggcattcatgtcgggtgtaccttcgttagctttatcatataaatgggtggga

SEQ ID NO: 951 - DNA, 402 bp, Lilium asiatic
  Clone ID: LIB3229-019-P1-K1-F11
atagcgtgttgtgactgtgttgtaatgctgagtgttgacagtggagtagcgagtatataatatatgtttctaactgggatgtaccagtgttgtggtaatcataagttgaaaaatgtgttaatgatttaaaaaatcaaaagacatgtagaccaaaatgacagacccacagacatcagcatgcgatatctaaagcatcattaactcctcggcttcgtagaacccttcacagcaggaagatggccctttcaatctctagcaaatgaagatcttgtccccaccaaccgtattatcaaatttaaatagttgacatcaactgcaacatctccaaaatcatcttcataaattgtcctgacataatcaacataccaaggtaccatttccttgtaaataatcccattagga

SEQ ID NO: 952 - DNA, 402 bp, Lilium asiatic
  Clone ID: LIB3229-019-P1-K1-F12
cccacgcgtccgctgtatctcatgaagggtaggttatttctttagatgtatatgtcagcatgtaggcaatccacgtgcacctttcaagatcattatcttggatgaggctgactcgatgacagaagatgctcagaatgccttgaggcgcaccatggaaacttattccaaagggacaagattcttccttatatgcaactacatcagcagacctaaattgtacaggtcaagagttctggaacttaatgctagtgatgatcgcggaatcaatgttgtaaggacaaaaataaaaatttcgctgctgttgccgtatctacttctatatctcatgaaggtggctatttacgtccaccttttaagatcattatcttggacgaggctgactcgatgacggaagatgctcaa

SEQ ID NO: 953 - DNA, 391 bp, Lilium asiatic
  unsure (1)..(391): unsure at all n locations
  Clone ID: LIB3229-019-P1-K1-F2
aaaaaaaaaagaanntttgcctgattagtcagtgttcgatgcccnnctgtggagtgtttccgggagcgacgaggcggcnntgaccgataactcgaattatgttgatgatctttactttgagaaggggattagtgcagatttgaatgttgtcagtgattcgatactgaggcttgctggggtggtcgagcacgggatgtttcttggtttggcgacgtccgttgttgttgctaccaatgacggaggggtgaccgtgattgccaaagatacatgaattggctgacgtctaggtaattatactatttagaggagttgggcattagtttgctttgattcatgtaacttgtctagtgattttgttgtatttttcttgaaaccaatcttgatgtagtag

SEQ ID NO: 954 - DNA, 76 bp, Lilium asiatic
  Clone ID: LIB3229-019-P1-K1-F4
tttctatattatctatctcttacctacgcccgcatgcgacgtgttatctgtagtatagggggacctaaaaccaatt

SEQ ID NO: 955 - DNA, 403 bp, Lilium asiatic
  Clone ID: LIB3229-019-P1-K1-F5
ctcaagagagcgatggacgatggtgcaaacgttgttggctacttcgcatggtcgctgcttgataattttgagtggaaattgggctatacctcaagatttggaatagtttatgtggactataagaacctgaagaggtatcccaaaatgtcagcttactggttcaagcacatactgcagaggaagaactaagaaaagttgagatttacttctgtcggtaggaggttttactggctctgaataacaggctgtcttttgttacatacctgcatcaatgtagaggtcaataaaaagggaacccagtgcttgaatctcttgccactgaggtatcaaatatatgcaacattttaaaacattaccttcggagtgaaatatgaagtataatgaatgttttgagtaatctgaa

SEQ ID NO: 956 - DNA, 332 bp, Lilium asiatic
  Clone ID: LIB3229-019-P1-K1-G10
cccacgcgtccgcggacgcgtgtcggtctcgtggggcggaggagatttttggtacggaaaatagagacctgtatggatccttccaaggtctgcttagccgcaatcttcgagcttgatacagttactctggtaacatagttgtaattttgacaccagactcagtctccctctaaaatagcgtccggcgtgttccaaccaactgtagaatcagttggctggactattataaaatttagggaaaacatgctcaccatgccggtctttttcttctctgatcaagaaacagtggggtatgtatgctttggacgagcatattaaattatgtttcctct

SEQ ID NO: 957 - DNA, 388 bp, Lilium asiatic
  Clone ID: LIB3229-019-P1-K1-G11
gctggtgaaacacttcgtttttaaggtgtcgagatggctgcgaagaggtttaatgtcgacctgaacaagcctgtggtatttcaggttggccatcttggggactcttatgaagaatgggttcaccagcccattataagcaaggaaggacctcgtttctttgaaaatgatgccttggagttcctaacccgaacagtctggtgggtaattccaatgatatggttgccagttgcatgctggtttgtaaccatgactatccgtatgggccactcgctgcctcgggtggttggctgattatgatcggtttactaacatggacgctggtcgagtatactttgcatcgatttcttttccatattaaaacaaatagctattgggctaacaccgtaca

SEQ ID NO: 958 - DNA, 350 bp, Lilium asiatic
  Clone ID: LIB3229-019-P1-K1-G5
attttgtacttgtcatgcgtcttgtttgtttcttacttgccatgcgtcttgttttaacaagatgcttgataggttgatgagtttatgtgttgaatttacagtttggtcttattttgtcggtgtcttaaaagtttggacctgatgagttccatgtggtaaatttacagtttggtcttaaaaaaaaaaaaaaaaaaaaaagaacaaaacaaaaataaattatctaaaaatataataaaatttaattgttaaatattaaaactctccctttaatcttatactggtcggccgctttataggatcaatcttacttaccctcccattcaactttataggtttttttttgggccccc

SEQ ID NO: 959 - DNA, 352 bp, Lilium asiatic
  Clone ID: LIB3229-019-P1-K1-G7
agaggaccccggagaaaccgtgcttgaatgatgtgtccgatgttggaacatggcggcaaacagctatgataatagcggcctctcttgtcgtactgattctcctaccattgcggaatgagcttgctgaggatcttggcatagggcttgtatattcattctgaggtgagtttcttacagtcctgagttttttctatacccaaaattttgcctatcatgatgaaagaaagctggcgagggttaacacatctaagcaaaactcactgtcgattcgatttcatgccgcttgggagatgaggaacctccttttgcgtcagtcattgatttttctagttcgaggttattgctggagacc

SEQ ID NO: 960 - DNA, 394 bp, Lilium asiatic
  Clone ID: LIB3229-019-P1-K1-G8
cggacgcgtgggccgccgcgcctccgatctctcgctcccatcagagttttcgtaggcctgtggtgctacttttctgtgcaaggatggtgagaatcagtgttctgaatgatgctctgaagagcatgtacaatgctgagaaacgagggaagagacaagtcatgatcaggccatcctcaaaagttatcataaagtttctaatcgtcatgcagaagcatggttacattggtgagtttgaatatgttgatgatcataggtcaggtaaaattgtggtcgagctgaatggacgtttgacaaatgtggtgtcatcagtcctcgctttgacgtaggtgtcaaagaaatagagccttggactgcgaggctgctcccatcgcgtcagtttggttatattgtgctg

SEQ ID NO: 961 - DNA, 339 bp, Lilium asiatic
  Clone ID: LIB3229-019-P1-K1-G9
gaaaaaggtacttagagagtgctgctgttgatagcctacttctaatacctaaagtgagagtcgcaagcatgtgtggatgatgatgtctgtatgttttcttctagtttaaggtagcaagtgtcaatgtctgtctatatttgcagctgtcaatgtctgtctatatttgcagcagagtagcagccgacttgtttgtgctgtggtgttcgagttttaagtgttcgtgtttgagtttagatcttactttgtcggcccgactgttagaccttcgacctgaacttcatataatgggcttcgaaggtcacccttttgtgttcttttgacattcaagtttacttgtaa

SEQ ID NO: 962 - DNA, 398 bp, Lilium asiatic
  Clone ID: LIB3229-019-P1-K1-H1
tgaatgtcttatcatacagtgtggttatgagcccgacctatgatagcgaggctaacggtgcctgtttgcatcattgagaacttcgagcagtgtcccgcaggttgctggacgactcacagagattcgggcttgttagctaaaaagactagccagccgagtagttcatgtggaggagttgtatcgggagattgcagtagactgcatgaataagaactttggtttgaatcgtccggacctatttgagtgaagatggttggatgtaaggagttgtagatctggagtcatctggttttgatctgggagagttttatttccatttggttattcgagatctgagttctttcttgttaccagctttgagtttgtctcgttgttttctgctctgcatagatcagtca

SEQ ID NO: 963 - DNA, 399 bp, Lilium asiatic
  Clone ID: LIB3229-019-P1-K1-H10
gtgagacttgtgaacaaggagtcccgttatcctggaggcgatcctttggttctgtgttttgttgattttgagtccgctagtcaagctgcagttgccttggaggctttacaaggttacgtgtttgatcagcatgacagagagtccacgaatttgaggctccaattcgctcgttatcctggtccgcggtcaggaggtgggtctggtccgaggtcaggaggtgggtatggttcaaagtcaggtggtgggcctcgtgctaggcgttgagttctcgtgtttctgtcatcaggccggtcgaggcgcgaggtgcgtgcgttggacatctagtaatgtagttgtttagcagtggcgttactttggtttgttatgggactattatcgtagatgagatgagtgtatgaa

SEQ ID NO: 964 - DNA, 122 bp, Lilium asiatic
  Clone ID: LIB3229-019-P1-K1-H11
ggggtgcgaccccacgcgtccgtctagactcgcgagcgagccgttttagttttatccaagacttacatacaacgtgggtgcgggcctcatagactgttggatagggccacctaaaaacaatt

SEQ ID NO: 965 - DNA, 247 bp, Lilium asiatic
  Clone ID: LIB3229-019-P1-K1-H12
gtgataccgacagatcccgttttattttatgcactcgtcccatctctcgtgtgggggtgcatgcctaaggggaagggcaacctaaatacccagcattaaacgtttggctacaaagtaggtactttgcattcaatgaagtttgaacaaataatggagttgcttcatataatcgtctcgagatctgaaggtataaaaaaaataaacataccggacagtctacaggatacaagcttacttacaatggcat

SEQ ID NO: 966 - DNA, 358 bp, Lilium asiatic
  Clone ID: LIB3229-019-P1-K1-H2
ccaccgcaaaacctccttttcctttcatggtcccctccccctctgggcgcgtcaggcagaagttcggcaacaagctctgaagaccgaatcaccatggaccactacctcgaaagctcacctcgcccgacatgcaggcccattcgcagtccttcgtcatccgatcaaaggcctaagcctcctcgctgtctgatctgctcctcaagccctctgccctaagcctccttatcacttaccttgtctattctattattgattaaggtgtatagtgatgattttcacgtttcccttcaggacagcaacgaagggtgctgacagagatgcaagtgggaaagtcatgcagagtattgccgtctgatca

SEQ ID NO: 967 - DNA, 218 bp, Lilium asiatic
  Clone ID: LIB3229-019-P1-K1-H5
cccacgcgtccgcccacgcgtccggtctaggccgtcctgtgaagaaaagcaggtagtggacctgcaaactttgaaagtggagatgaatgtggtgaagggaaagtgttctgtcttgtcttttctcagtaggttccctagtttggttttaagaatctctctggttggatatgtagaatttaaactttcattctctatttcagtacaaatcttgcagtaaa

SEQ ID NO: 968 - DNA, 395 bp, Lilium asiatic
  Clone ID: LIB3229-019-P1-K1-H6
gttttcccaatcctgcaaatcaatggctacggctcaacctcaaggagcagctggtggcgccgccggggcagcggcgaagcccggattgagaaaaccggtgttcgtgaaggtggagcagctgaagccgggtaccggtggccacacgctcacggccaaggttctcagctccaagatggtgctgcacaagggtcagggtacggcgccgcaccttcgccagtcacggatcgccgagtgtctcatcggagatgagaccggcaccatcctattcacggctcgcaacgatcaggttgacatgtgaaaccagatactactgtgatcattcgcaattcaaagatagatatgttcaaaggctcaatgaggttagccgttgacaaatggggtcgcattgaggtcac

SEQ ID NO: 969 - DNA, 281 bp, Lilium asiatic
  Clone ID: LIB3229-019-P1-K1-H7
tcctcgttatttggctggaaaccaaaggccactaaatctgtggttcgctgaagttgagtcttggtttttcgccaattgcatttgcctttcagttttgaactcctgcagttattgaagttattttaggatagcccttgttggaatccttccacttattgtcacattctaccgcatgaatttccctggtgagtcataaatggtgtagaagaattgtgttccttggtcattggttgatatcacagggcaataaatctgcggtttggtgaagttgagtattggtt

SEQ ID NO: 970 - DNA, 201 bp, Lilium asiatic
  unsure (1)..(201): unsure at all n locations
  Clone ID: LIB3229-019-P1-K1-H8
gggggagccaggcgtncgnaactcttcaccaccgcaaaacctccatgcctttccatggtcccctccccctctgcgcgcgtcaggcagaagtgcggcaacgaagctctgaagaccgaatcaccatggaccactacctcgaaagctcacctcgcccgacatgcaggcccattcgcagccctccgtccttcgatcaaaggtctt

SEQ ID NO: 971 - DNA, 368 bp, Lilium asiatic
  unsure (1)..(368): unsure at all n locations
  Clone ID: LIB3229-019-P1-K1-H9
cacgcgtnccgggntttctctctcagagtatacgagctcttctttacgacctatctcagaagcagaatggttactatcgctccgtatttgactgctcttgttggggagcttgttggtgctcgtcttattgcacatggtgggattttgttgaatctcgtaaagcaaccagggagcacgattcagattcttggtgcagagaaggtacactcaaaccccttttgattactgcatgttatacttcttcttccacgttgcttaagccactagtggggtatggggctttagtatgttcctgaaataagttgttctattgtgattgtaaggggctttaaatgggcagcctctaattcttaaaaaacccctttttt

SEQ ID NO: 972 - DNA, 245 bp, Lilium asiatic
  Clone ID: LIB3229-020-P1-K1-A2
ccgacgcgtgggctgacgcgtttgctctgtctggtggcaaccaggtgaggttaatgtgtttatagggcctactggtatgtctacttagcttgtgctctcattattaggcctacttgtggaaagcggcagcaattatagacgcttgattcaccaattgttgttgggtcaacaagaagaaggtgtcactgctctgtgttttatctcaaggtgttgcaattttgactctcattattttttatgatggg

SEQ ID NO: 973 - DNA, 164 bp, Lilium asiatic
  Clone ID: LIB3229-020-P1-K1-A3
cccacgcgtccgctcagcgtgttactatcttaagagggaatcatgagagtcgacagattacttaagggtatggattttatgatgaaaggctgcggtagtatgggaatgccaaactatggaagacctttacaaaccaatttaacttcttttcaatgacttttttg

SEQ ID NO: 974 - DNA, 399 bp, Lilium asiatic
  Clone ID: LIB3229-020-P1-K1-A4
gggacgctacttgaaagaaaggctcatggcccttcaggaaaaacatgatgtcattggagatgtgaggggaagaggcctgatgctcggactcgagctagtctccgatcgcgaactgaagacccccgccaacactgaaatcttgcgtgtcatggatctcatgaaagacatgggtgtattatgtcgggacgggaggattctacatgaatgtgttcagagtaaccccgcctctctgtttcaccaaggacgattcaaactaccttgtcaatgtgatggacattgctatgtcttagctgcgaagctctcacacgagtgatgatgtcggctcaccattgtatgcttggagaataagagtcgacgttgttatgtcgaagctgtgaagctctcaccccagtgataatg

SEQ ID NO: 975 - DNA, 84 bp, Lilium asiatic
  Clone ID: LIB3229-020-P1-K1-A5
acgtcactctagacgatgcaagcttacgtaaccgtgcatgcttcatgatctcttttatatagcgttacctaaattaaattcaac

SEQ ID NO: 976 - DNA, 408 bp, Lilium asiatic
  Clone ID: LIB3229-020-P1-K1-A6
cccacgcgtacgcatgttctgagattgcagaccttctggatctgacgccgtacccggaaggcgggttttactctgagactgtcagggactcatctatacttctcttcaagtatcaggtaccaccccactacaaggtggaacgatcggtgagctcggctctaaacttactgctaccatctgggagtgttgtaaaactgcatggcatgccttgtgctgaaggatgtcagttctacaagggagaaccactcacggtgtgtgaggtctacgatgatggtcggatcaagctgacggacctgggctcagatcttggatctaggcaacgttcccagtacacggtgcctccgaaagtgtggttcggttttttccccaagtttgatgttgaatcgcatgagttcgatggtagctctc

SEQ ID NO: 977 - DNA, 254 bp, Lilium asiatic
  Clone ID: LIB3229-020-P1-K1-A7
cgtacccacacgcgcgcagggtatcatttttggatttgcaggtgtccaacaccttggtcttacgagcttatacaagcccgggggtgccgctgttataggtaatacagcattatgaggtcctattggggaaaccggaattatttatagaagcttctttacacaaatgttctgggggcaataaaaaaaggtttaaattgtgaaaacaatgtttttaacgtcgtaaaatgcttactttcaataatgttttctaaggg

SEQ ID NO: 978 - DNA, 78 bp, Lilium asiatic
  Clone ID: LIB3229-020-P1-K1-A8
ctacatttctggtttatctcaatatgttgcgacccacactctcattatcttgtatgatggggttctagaagattgtca

SEQ ID NO: 979 - DNA, 332 bp, Lilium asiatic
  Clone ID: LIB3229-020-P1-K1-B1
gtttcacctgtagttatccctcctcaatcgtaacgctgctcggtccacactcgctcctcctcacccccgtcggggcgcggcaccggaagtttcatcttctcatcctcgcccgctttggatctgctgcggctctgcgggactctccatacctgatgagagacattgaccgactggtgaagagcagtatggcggcatgggaggagggccggccggtgcggctgctggagcaggcgaagaaaattacgttcgagcttaccgcgaagcagttgatgagcgaggggcccgcggagtggatggaggaactcccgccgcactatttactggtgattgat

SEQ ID NO: 980 - DNA, 320 bp, Lilium asiatic
  Clone ID: LIB3229-020-P1-K1-B11
ccagcatcaatggcaatggggggaatcatgtcttcacccttgatgatgatttctgagacttgcttgattggatgctggctttgatgcctctgctgccattgggttagtttaagtttaaaatttgtttattttctgtttgtattatattgttgttgaggttggggtgcttgtttattgctttgatgaacgattgagcttgtgccgttgtgggcttgagttgtttgatgaaatgcaagacagaggagaggtcatttgttggtctcttggttaaatttttagcggttgttttatctatgaattgtttgatcaaattcttgctg

SEQ ID NO: 981 - DNA, 415 bp, Lilium asiatic
  Clone ID: LIB3229-020-P1-K1-B12
aaagaaacatccagttcatggtattcatgggtacgaggatctcggggtggtcagtcgagcgacagtcccgaaggccatacctggaatgaggaaatggatcctttccatataccttccgactacacctgggtcgatgccaacgagaagaagcgccgcatgaaggccaagcgggtgaagaacaagcgtggtttaagtaggaaacacacatcaaaaagtggagaaggcccacaactgattgatggcttcgaggattaggtggtggagacgcaactaaattaggtggttttggaatgttgattgtaagatatgtttcggcatggggttagcatgtatcggagagcatatcgaaatggaaggtaatgcgagcgatttcatgcacttaaaattcagggtctcttgtgtatgttaacaaaat

SEQ ID NO: 982 - DNA, 225 bp, Lilium asiatic
  Clone ID: LIB3229-020-P1-K1-B2
gttggtttcttattttcctgtttcctcaggagaagcttgatgccttattcggagcagggaaaactggtataaaccttgatgctattttgctgtaaattacattagttgaaacccctttttcctggtcaagaggttttcatttgtctgtctttcctctgacacagttcttaattttgatcggacgaggaacaagaatactaatgacacaaaaaaaaaaaatatttt

SEQ ID NO: 983 - DNA, 121 bp, Lilium asiatic
  Clone ID: LIB3229-020-P1-K1-B3
acgcccacgcgtgcgtgtcatttcgagatgctgaattatatgatacctgttattaatggcgcgcatggcccggaataagccctctgtaggtgaacaataaattcaattcagggggacgagg

SEQ ID NO: 984 - DNA, 404 bp, Lilium asiatic
  Clone ID: LIB3229-020-P1-K1-B4
gtcgagacaaccacccaaggccatgatgaccttggcaagcgatgtgccaagtactacgaggctggtgctcgctttgccaagtggcgtgctgttctcaagatcagtgcaaccgagccttcccagctctcaattgatgccaatgcgtatgggttggcacggtatgccatcatctgccaggagaatggcttggtcccgattgtcgagcctgagattcttgttgatgggtctcatgacattgatcgatgtgcttatgtgactgagcgggtgcttgctgcgtgctacaaggccctgaacgacaacaacgtcctcttggaagggacactgctgaagccaaacatggtgacaccaggctcagatgccccgaaagttgcacctgaggtgatcgctaaatacaccgtacgcac

SEQ ID NO: 985 - DNA, 416 bp, Lilium asiatic
  Clone ID: LIB3229-020-P1-K1-B5
agccgcccaagttctacccggccgatgatgtcaagatccctattgctaaccgtcgcaaggcgaagccgactaagctgagggcgagcatcacgccggggacggtgctgattctgttggccgggaggtttatggggaagagggttgtgttcttgaagcagctgacttctggtttgcttcttgtcactggcccctttaaggtcaatggtgttcctcttcgtcgtgtgaatcaagcttatgtaattggaacctcaaccaaagttgatataagtggagtcaatgttgagaaatttgatgacaagtacttcggaaaggagggcaagaagaagaacaagaaggtggagggtgagttttttgaggctgagaaagaggagaagaaaccagtttcccaagaaaagaaggatgatcaaaaggctgtg

SEQ ID NO: 986 - DNA, 141 bp, Lilium asiatic
  Clone ID: LIB3229-020-P1-K1-B6
cccacgcgtccggttcaatttagtatgttctctatttaggctcttctttctttggtacctttgtatgtctatcaaagtttcttttagagaagacttggtaatcacattttcataatcggcatgtctcacatatttgttggc

SEQ ID NO: 987 - DNA, 387 bp, Lilium asiatic
  Clone ID: LIB3229-020-P1-K1-B7
gcgggttgacctgtagttatccgtcctcaatcgtaacgctggtcggtccaacactcggtgcttgcttacccccgtcggggcgcggcaccggaagtttcatcttctcatcctcgcccgctttggatctgctgcggctctgcgggactctccatacctgatgagagacattgaccgactggtgaagagcagtatggcggcatgggaggagggccggccggtgcggctgctggagcaagcgaagaagattacgttcgagcttacggtgaagcagttgatgagcgaggggccgggggagtggatggaggagctcctgcggcactatctactggtgattgatggattcttctcgatagcactttcgtcgttcgtgcctgggacttcctacgc

SEQ ID NO: 988 - DNA, 263 bp, Lilium asiatic
  Clone ID: LIB3229-020-P1-K1-B9
caactctttttaaatatttatgtgttggtaacgataaatggataaatgaagaggacaactaattatagggtataaaggtattagtaaatgtggattcaacatagaatttataaaagttaatttagagttttatgagatacttatcatctatgaaccagaaaatactctttggttatagaggaaagatgtgacaagaagaaaaaaaaagtcaaatattttgtggagacctacaagataaacaatttgaaggtgttgaagcttgt

SEQ ID NO: 989 - DNA, 397 bp, Lilium asiatic
  Clone ID: LIB3229-020-P1-K1-C1
accctagcgtctagatcgcggtcggacgatttatatgatgccaagcttcaatcgcttagcgtgcgaggcaactgattataggtggtgaagcctttagtcaatgcggtttccacatataatctataaaaggtcatttagagctttatgagatacttatcatctatcaaccagaaaatactctttggattataggaaatagatgccaagaaagtaattaaatttcattatattttagctatttttacttagaaattattggggtattaagatttttagcataaacttatataacatgagtgtgcaaaaccaagatattatttctaatttttctgcccaaagattagaacatatgtatcaaataattttggtgcataaataaaaaaacattttgagatct

SEQ ID NO: 990 - DNA, 410 bp, Lilium asiatic
  Clone ID: LIB3229-020-P1-K1-C10
ggggagcacgtgttcggcgtcgctcacgtgttcgcatccttcaacgataccttcattcatgtcacggatctgtccgggagagagactcttgttcgaatcactggtggtatgaaggtcaaagcagacagggatgagtcatccccttatgctgccatgcttgcagcgcaagatgtcgcacagagatgcaaggagcttgggattactgctctgcatattaagcttcgggctactggtgggaataagacaaagacccctggtcctggtgctcaatctgccctccgagcgcttgctcggtctggaatgaagattggccgcattgaggatgtcactccgatcccaactgatagcacccgccgaaagggtgggagaaggggaagaaagctgtagctttcatgacttcctactccttc

SEQ ID NO: 991 - DNA, 417 bp, Lilium asiatic
  Clone ID: LIB3229-020-P1-K1-C11
cacatgtatcatgatatgtatatgaaagtgaaaggtaatgtcttcaagaacaagagggtgctcatggagagcatccataagtccaaagctgagaaagcaagagagaagaccttggctgatcagttcgaagcgaagagggcaaagagcaaggcaagcagggaaaggaagcatgctaggagagaggagcggttggcccagggtccaagcgcatctgtagctcctgcagcaccacctgtggcccaacctgccgaggctcccaagaaaaccaagaagtgaaaatcaaatttgtgccaagtattagtcttcaaactttattattgtctttttattccagtttttcagaaacaattaagatgtctctgtttattggagctgtaactctggcaatgttcaatggtggcacaatttggttaatat

SEQ ID NO: 992 - DNA, 416 bp, Lilium asiatic
  Clone ID: LIB3229-020-P1-K1-C12
cgagcaccagcagagagtgatgacggcggcggcatggcggcgctatggtctggcggcggtggctcttatggcggtgttatcctctcatctcgcgtcctccgccaagacacataggtcattcgtgaggaagaccgtcgcctcccacgacatcgtcatcttctccaaatcctactgcccgtattgtaaaaaagcaaaagctgttttcaaagaattaaacagtgtacctcatgttgtggagctggaccagagagaggatgggtcggatatccaaggtgctttgtctgaaattgtcgggcggcgcaccgtccctcaagtttttatttatggaaagcatatcggcggctctgatgatactgttgaagcatatgaaagtggcaggctgaaaaagcttctgaaaattgactccaaggatgatc

SEQ ID NO: 993 - DNA, 407 bp, Lilium asiatic
  Clone ID: LIB3229-020-P1-K1-C4
gttcagtagtgttccgagtggcgatgctattttcatgaagtggattcttcacgactggagctatgatcactgtttaagtgttctgaagaattgttttaaagcactacctgaaaatgggaaggtgatccttgttgaaggcatccttcccgtggcacctgagcaaacacccgcagcacagacagacttccatgtcgaccttataatgcttgcccacaacccgggaggcatggagaggactgagaatgattttgaggccttatccaagggagctggcttttctggattaaaacctttggtcggtttcgctaattcttggattattgaggtctacaaatagatgtagatcgagatcactttggttgtgcaggtttcggggggaaaattgtatggtattttgtcgtcttgta

SEQ ID NO: 994 - DNA, 414 bp, Lilium asiatic
  Clone ID: LIB3229-020-P1-K1-C5
gtgggtatgatatcaactatgttctcgactcgcctgcggacaacaaaggcttgaagaaggctgcaattgtcgttgatgcgaggtctggcaggagacttgagctgtggaccaaccagccaggtgtacaattctacactgccaactatgtcaaggatgttgaggggaaggacggatacatctatggcccgcattctgcattgtgcttggagacacagggttttccggactctgtgaatcaccccaactttccatctcagattgtgaaacccgggaaaacataccagcattttatggtcttcaagttctcgaatgtgtagaaaattgagagatacttctcttctcttgataatggaatcagtttgagggtttcagtttggattaataaaataggacatcacaattatatatttatgc

SEQ ID NO: 995 - DNA, 416 bp, Lilium asiatic
  Clone ID: LIB3229-020-P1-K1-C6
agcgatctggtcaccgctccgccgtcgacgatgtcgagcttcagcggtgacgagaccgcccccttcttcggcttgctcggcgccgctgccgccctcgtcttctcctgcatgggagccgcgtacgggacggcaaagagtggcgttggcgtggcgtcaatgggggtgatgcggccggagctcgtgatgaagtcgatcgtccccgtcgttatggcgggagtgctcgggatctacggactcatcatcgccgtcatcatcagcaccgggatcaaccccaaggcgaagtcatactatctgtttgacggatacgcgcacctctcgtctggactctcctgcggtttggccgggcttgctgccggcatggcgatcgggatcgtcggcgatgctggtgtcagagcgaatgcccaacagccaaagct

SEQ ID NO: 996 - DNA, 405 bp, Lilium asiatic
  Clone ID: LIB3229-020-P1-K1-C8
ggaagttcctacttgcaccgtcggagatcgccgatgtcgtggtcgtctttgctgaatcaaaaactggatcagcagttctggctaatgattccccgtatccatatccaaccggggatccggtagacgacacaaatggcattgtaatgaaattcattgtttcaacagagctggaaaaagatgagtccagggtgccgaagcggctgctgagatatcaagcaccggcaaatcctcagactgctgagaaggagaggtacattgtgatgtacgagtacgagagtcagacaggggatccgactcacttatacataaatgggaagtcgtatgaggcggtggtgaccgttacgccactagaggggagtagtgaggtgtggactgtgataaatctgacagacgtcaaccacccgc

SEQ ID NO: 997 - DNA, 233 bp, Lilium asiatic
  unsure (1)..(233): unsure at all n locations
  Clone ID: LIB3229-020-P1-K1-C9
cgnntccgctagtngttctagnnatcgcgagtcggccntngctctagtagtgatccatagcnnttatcgtatcgcgtgcatanngcgacgtcatgagtctctgtctattagnntgtcacactaaattcannattcactgagccgctcgtgtttacacacgtctgtgacttgggaataaccactggtcgttaccccatacttatatcgtccttgtcagcacaaatcaccccttt

SEQ ID NO: 998 - DNA, 415 bp, Lilium asiatic
  Clone ID: LIB3229-020-P1-K1-D12
gttttaagagagcaagcatcttggaagccagagcaaataagttatgttggagggtcttcattgcaagattatacacatgcttatcctggaagcaagcgtccgtactctctattggaagatgcaccccaaactgacttgagaggttatcctcgttctcgtctggaaagctcttttccagtcacaacaagctcaagctatgcagcactgtcccatgagttgcctggctcatccttgtcgtatcagcagcgctatggtgctggctatggatctgggtctccttaccagtcaagcacctttcagagggggggacaaagcggttcttcgtacaggggaaactatcattattgatctacattgtgcttcaccttacatacaatgtggttccggcgcagacagtcaactgtgggttcgaatg

SEQ ID NO: 999 - DNA, 413 bp, Lilium asiatic
  Clone ID: LIB3229-020-P1-K1-D2
ggatattttcttttaaaggtaaactttctgaaatacggatttgcccttcttccctatatgtctcatacagtagctgtttctttgtcattctctcaaactaccgggcgatgatggtcgctgagcatgatgcacaagcactcgcgtttgcagctggggccgtcgttatagagccaactttcccaatcacggttgagagcgccgagtaccacaaggaccataaatatgggtcaaatttggagaagagttacctctccaccgttagggtaattcctttttgaaatacaatttgttagttacatttataataatgacttctttttttttctttttcaaaggagcttctggacagggggttggatgggaggacaccaacaactttcatatcatttgatgctctcaaagacgtaatgatg

SEQ ID NO: 1000 - DNA, 417 bp, Lilium asiatic
  Clone ID: LIB3229-020-P1-K1-D4
gttcagtagtgttccgagtggtgatgccattttcatgaagtggattcttcacgactggagcgatgatcactgtttaagtgttctgaagaattgttttaaagcactacctgaaaatgggaaggtgatccttgttgaaggcatccttcccgtggcacctgagcaaacacccgcagcacagacagacttccatgtcgaccttataatgcttgcccacaacccgggaggcaaggagaggactgagaaggattttgaggccttagccaagggagctggcttttctggattaaaacctctggtcggtttcgctaattcttggattattgaggtctacaaatagatgaagatcgagatcactttggttgtgcaggtttcggggtgaaatttgtatggtattttgcccgtttgtattgtagtttt

SEQ ID NO: 1001 - DNA, 415 bp, Lilium asiatic
  Clone ID: LIB3229-020-P1-K1-D5
gcggcatcgccggttcgaagcgagcgaaagaagcggagtccggtttaggaagcaaaacgaagccatgcaccaaatttttcagcactgctggatgtccatttggggagggctgccatttccagcactatgttcctggtggattcaaccctgttacccaaaagggtaacttgggcaacctagctcctcctccaagaaacccaatggtttctgctccccctcctggagccgcatctttgcctactgctaagacccgcatgtgcaacaaattcaatacagctgaaggctgcagatttggtgataagtgtcactttgctcatggagagagggagctgggaaagcctattatgccgtcttatgatgatgctcctgtgggtttcttagctggggggagattagcaggtcgccttgagccacc

SEQ ID NO: 1002 - DNA, 269 bp, Lilium asiatic
  Clone ID: LIB3229-020-P1-K1-D9
atcaatggccaccgaagttcgccgaggagccgagtgagagcgctactactttattttttgccagcacctagctttcagcaagaagggagccggtgccttagcgcaagcactaagtcagcctcactccttccacacggagacctacctatagtgacgtcaaagccaggtgcttggacgaggtcgagggctccggcggcaagaaggcgagccgtccggtggtcacactgacgcttcaaaagggctgcgctaaggcgcaaggctagactccg

SEQ ID NO: 1003 - DNA, 416 bp, Lilium asiatic
  Clone ID: LIB3229-020-P1-K1-E11
ctctcctctctctccaaaaaaatggcggtgtcgggatacgatgggatcctgctggggatgggcaaccccctcctcgacatatcggccgtcgtcgacgatgatttcctcaacaagtatgatatcaagccgaacaatgccattctcgcagaggagaagcatttgcctatgtatgacgaaattgtagaaaaatataatgttgaatacattgctggaggggctactcaaaattcaataagggttgcccagtggatgcttcaaattccgggggcaactagttacatgggttgcattggaaaggacaagtttggtgaggaaatgaagaaaaactcaacagctgctggtgttaatgttcactattatgaggatgaaactgctccgacgggtacatgtgctgtctgcgttgttggtggtgaaag

SEQ ID NO: 1004 - DNA, 197 bp, Lilium asiatic
  unsure (1)..(197): unsure at all n locations
  Clone ID: LIB3229-020-P1-K1-E12
gttttaagatagcacacaaaattttatttcttagcaaaacaanaatatcctaggtggtgtattcaaatattttactcggcgcttataccgcaagcaaccatcctttctttatataggatgatacaccccaaaccaacttcagaaggtatactcataatcatctacaaatctctttctcaatcacaacaaactcaaac

SEQ ID NO: 1005 - DNA, 414 bp, Lilium asiatic
  Clone ID: LIB3229-020-P1-K1-E2
ctcagaaccctagttttcgaaacagctgagatggagaccggatccaaggccaagaagggcgccggcggacgcaagggcggtccaaaggctaaatcggtgagtcgttctgtaaaggccggacttcagtttcctgttggcaggattgggcggtacctcaagaagggtcgctatgctcagcgtgttggttcaggagctcctgtctaccttgctgccgtccttgagtatcttgctgctgaggttcttgaattggcgggcaatgcggcgagggacaataagaaaaatcgaattgtgcctcgacatgtgtgtttggcggtgagaaatgacgaggagcttgggaggttgttgggtggtgttaccattgcccatggcggagtcctccccaacatcaacccagtcttgctgtcaaagaagacc

SEQ ID NO: 1006 - DNA, 347 bp, Lilium asiatic
  Clone ID: LIB3229-020-P1-K1-E4
ttcagtgtgttccgagtgggattttttttatgaagggattcttcacgactggggcgatgatcactgttgtgagggtgctgaagaattgttttaaagcactacctgaaaatgggaaggtgatccttgttgaaggcatccttcccgtggcacctgagcaaacaccctcatcacagacagacttccatgtctaccttataatgcttgcccacaacccgtgaggcaaggagaggactgagaaggattttgaggccttagccaagggagctggcttttctggattaaaacctctggtcggtttcgctaattcttggattattgaggtctacaaatagatgaagatcgagatc

SEQ ID NO: 1007 - DNA, 275 bp, Lilium asiatic
  Clone ID: LIB3229-020-P1-K1-E7
acgatatttcatgcggccggtctagtgtattctatccaacctacccctgggggccacgggacagctttagggttgtgtgacctaaactcaattcactggactggccgtaacaacacaacgactggtcagacaaaaccattacctaacttaactgaatggcagtacatcccattctcttcagcgtaaggtgatatcgaataggacaggaccgatcggcctgcccaacagaagagcagcccaaacggcgaatggaacagcgccccgtagcggcgcat

SEQ ID NO: 1008 - DNA, 59 bp, Lilium asiatic
  Clone ID: LIB3229-020-P1-K1-E9
cccacgcgtccgcccacgcgttcgcccacgcgtacgcccacgcgttcgcccacgcgtcc

SEQ ID NO: 1009 - DNA, 412 bp, Lilium asiatic
  Clone ID: LIB3229-020-P1-K1-F1
cccacgcgtccgcccacgcgtccgaaaccattcaactctctctctctctctcactctctctccctatccctcttctgtttctcttctctatttggactcccgataaaccctctctcttctttccacttatctagaagtccatagatacaccatctatcatagtagagactataagaacatggggtcttggggaggtggataaagttggaaagaatggaaagtataatagaggcatattatgttgaggattttctcatgagattcaaagatttgggtggaggaaatagcttcgtatgaatgatcaatccatattagatcccttataatgtgcccccttaattttttttctttgaaatactatgaattttttatttgaatgataaattagaactcaaattagttggtatgagat

SEQ ID NO: 1010 - DNA, 418 bp, Lilium asiatic
  Clone ID: LIB3229-020-P1-K1-F10
cgctgagcgggaaattgtcagggacataaaggagaagcttgcgtatgtcgcgcttgattacgagcaagagcttgaaactgccaagagcagttcctctgtggagaagagctatgagctccctgacgggcaggttatcaccatcggggccgagcgcttcaggtgccccgaagtcctcttccagccatcattggttggaatggaagcggctggcatccatgagacaacctacaattccatcatgaagtgtgatgtcgatatcaggaaggatctgtacggtaatattgtgctcagtgggggcacgacaatgtttcctggtatagccgatcgcatgagcaaggagatcacagcccttgcacctagcagcatgaagattaaggtggttgcaccgcccgaacggaaatacagtgtctggattgga

SEQ ID NO: 1011 - DNA, 420 bp, Lilium asiatic
  Clone ID: LIB3229-020-P1-K1-F2
ctggctttgatggcaattctgatagtgactcaagtcatgatagttcggacattggagatgatgatagccaattagaaaatcaaaaggttgcagttgagctcaaagttcacggggaaaaggaacatgtagcagtgaaaatggacaccaaaacagaagctaccgtttcatcagatcttggcattgagaaatccatcttcattaaacccaagacgttccacttaactgttcttatgttgaagctgtggaacaaggaccttattgctagagctgctgaagttctacagaaaatctcttcgaaagtaaatgatgctctggacaaccgccctgtttctgtaaagcttaaagggctggagtgtatgcgaggatcaccagccaaggcccgcgtcttatatgctccagttaaggaaattggtgcagagg

SEQ ID NO: 1012 - DNA, 421 bp, Lilium asiatic
  Clone ID: LIB3229-020-P1-K1-F4
cccacgcgtccgagtaattcgggttcattgatagggcatcctgttgagaatattcgtgtggtcttaacagatggggcagcacataatgtggattctagtgagcttgcttttaaattagcatcaatttatgcctttagacagtgctattctgctgctaagccagtgatactggaacctgtgatgcttgtggaattgaaagctccgaccgaattccagggtaccgttactggtgacatcaataagaggaaaggtataattgttggaaatgatcaggatggggatgatacagtgctagttgcccatgtaccattgaataacatgtttgggtactctacatcccttcgctcaatgacacagggaaaaggtgagtttaccatggaataccttgaacactccccggtttctcaggatgtacagacac

SEQ ID NO: 1013 - DNA, 423 bp, Lilium asiatic
  Clone ID: LIB3229-020-P1-K1-F5
tgtttcttgatgatgacattgttgtccaaaaggatttgacaggactatggtccgtagatctaaagggaaaagtcaatggtgcagttgagacttgtggtgagagtttccaccggtttgacaagtatcttaatttctcaaatccgcacatcgccaggaactttgatcccaatgcatgcggctgggcctatggaatgaatatttttgaccttaaggtgtggaagaaaaaggatatcactgggatttatcacaagtggcagaacatgaacgaggatagagtgctgtggaaacttggaacacttcctccaggactattaacattttacggattgactcacccgctggacaaatcgtggcacacacttggattgggttataacccaagcatcgatcgctcggagctggaaaatgcagccgtcgtgcact

SEQ ID NO: 1014 - DNA, 410 bp, Lilium asiatic
  Clone ID: LIB3229-020-P1-K1-F7
cggacgcgtgggctagggattgcacgtgatttgttcaatagacctgatcagttttgatattttaaattaccaatggaaaattgttgttatttaatataataatgaatccaaattcaattggatcccaaagtaatataagatcctctctgtcaaaggaaatggagtggatatagtttgagagagagttcactccaaccgatttgtttgtttgacctgcaatgacgcatcatcgcaaaatctacgaaataagagaagatgcttgtgaggaatcacgatattgttcttctccttatgaggagtggaagaaggacatgagagatgtttgaaataattctttgttatattttcagttaaagttggagagcttgtgaggatcaaaatagaataataagagagtgatactttcattt

SEQ ID NO: 1015 - DNA, 268 bp, Lilium asiatic
  Clone ID: LIB3229-020-P1-K1-F8
agatttttgaatgtgtgaatctcgagcccggagcctttgctaacactactgttacagattgtaagtatattgtcttcagttgagatgtttttgggattgatggatgtacctgctggtttgctctgaatgctaaatgtgtttatatggtttgcaagtctacagcagctcatgaatgggaagtgtttggtattttgatggtctaattaaacatatattgtaactttgaatattcatgcctaattaacatgctatggataattaccctaaa

SEQ ID NO: 1016 - DNA, 418 bp, Lilium asiatic
  Clone ID: LIB3229-020-P1-K1-G1
gcgagattctgacagaaagagacagaatgccatgacataggtaactaagggaggagatgacatataagcgcccgaaatgacagtgctaaggaggtgagctaatcgtaatagcactaattctataggagatgagcttgacagatacagaggtggattgaacgagcctcagagtgccgccccttcacaggcaggagagaggctttgctacttaggacccttcgaaaaaagaggcaagcaggcaccgaagggttagttaatctcactcctggtaggaaagtgctttttattttgatatgtattgaccgaatacgttaagaaatgacagtgatccatcgggaacttaaagtggtggtttaaagtcgggccgaagccatctgccaaaacacctatgggctattgggcgttctcatttcatact

SEQ ID NO: 1017 - DNA, 394 bp, Lilium asiatic
  Clone ID: LIB3229-020-P1-K1-G10
agttccggcaccctgatccctacattgttccctgggctcctggtggcagcaaatttacacgaaatccagcaccggcctcggggattgagatagtttacgactatggcaaagaggactgaagctgaaaaccgcacttaaaataatgctgaatatgctcgggtgcaaagacattgttactcctttttcctatccttttcagatcaaacaatgtttcatcaaataaggtagaaatgttgtttctgtgcttatcgatgtaagacttgtatcaaattcttaagttgtaagctgatgacaagaggtacggtggagacccgcccctttacatctctttttcattgtgtactgaagatggtgtatctacatttgaaagttacgaattgcatgctattggttg

SEQ ID NO: 1018 - DNA, 406 bp, Lilium asiatic
  Clone ID: LIB3229-020-P1-K1-G11
tctagcggacgcgtgggtgcatatatgagctatatgctcgaaggcactttctgtttcccccatcaagtatcagtgattataatgaacgtgtgatgaaagtagtacgctgtgaagcacaggatctattgctcaagaagcttctcaatgaggactacttaacagaagaagaaagggatgtactccgttggggaaaaaacatctttggcaacaaaacacgaactacaaaacgggccggtgttgctgtctacaacagagcgtcttcgctcgaaacactgattggatatctttacctgactgatgtgaagcgattggaaggactaatgcaccaattaggattctcaacaagggcttctcaacttattgcagaggacctccgcatgaatttcaagaaacaaccaatcgaact

SEQ ID NO: 1019 - DNA, 251 bp, Lilium asiatic
  Clone ID: LIB3229-020-P1-K1-G12
gaaagatgctaaagtgtgcgcccctctcaaggtggatggtgaacctaatggagaacatccagggaaggtccatgatgaaatattacactctacagataagtttgaaggagatggagtagatagggtagtaacttagcttctggtttaattctagtaattcaagggaatcctctttggggtggaagcaacttggccttcaattggccgtgaataatcctggtccaagtcctaatgcactaacactttttttt

SEQ ID NO: 1020 - DNA, 392 bp, Lilium asiatic
  unsure (1)..(392): unsure at all n locations
  Clone ID: LIB3229-020-P1-K1-G4
agttccggcaccctgatcccttctttgttccctgggctcctggtggcagcggtatggacacgaaatccaggaggggcctcggngattgagatagtttacgactatggcaaagaggactgaagctgaaaaccgcacttaaaataatgctgaatatgctcgggtgcaaagacattgttactcctttttcctatccttttcagatcaaacaatgtttcatcaaataaggtagaaatgttgtttctgtgcttatcgatgtaagacttgtatcaaattcttaagttgtaagctgatgacaagaggtacggtggagacccgtccctttacatctctttttcattgggtactgaagatggtgtatctacatttgaaagttacgaattgcatgctattgg

SEQ ID NO: 1021 - DNA, 412 bp, Lilium asiatic
  Clone ID: LIB3229-020-P1-K1-G7
cccacgcgtccggtcactggcccctttaaggtcaatggtgttcctcttcgtcgtgtgaatcaagcttatgtaattggaacctcaaccaaagttgatataagtggagtcaatgttgagaaatttgatgacaagtacttcggaaaggagggcaagaagaagaacaagaaggtggagggtgagttttttgaggctgagaaagaggagaagaaaccagtttcccaagaaaagaaggatgatcaaaaggctgtggatgctgaattgattaaagccattgaggcagtcccagacctgaaaacttacttaggtgccaggttctcccttaggtcagggatgaagcctcatgagcttgtcttttagatttcaagagaattgtccctgtccctgtgcctgtgttcgtaggttttgactgggg

SEQ ID NO: 1022 - DNA, 409 bp, Lilium asiatic
  Clone ID: LIB3229-020-P1-K1-G8
actggatatgaataactcgctcgacatctagagtgatgaccttaaataccattatcaaaatggcaaggctgttaaagctctcaccatcaatgatggcaatactgacgctgggtcctctgtccaagaaggcgatggtcctactacggtgaatggtactctgtccgggctgaaacccgacctccatggctttcatgttcacgccctgcgggataccaccaatggctgcatgtctactgtgccacacttcaatcctgctggaaaagtgcatggagcccctgcggatgagaaccgtcatgctggcgaccttggaaatgtgactgtcggtgaagatggtaaggttacctttaccattgttgacagccagattccactctctggacctaattccattattggaagagctgttgtt

SEQ ID NO: 1023 - DNA, 251 bp, Lilium asiatic
  Clone ID: LIB3229-020-P1-K1-G9
actagatatcaataaatttttcgatattttcaatgaggaccaccaatcccacaatggaaaatttaaggattataaggaacccaccctcaaccatggcaatactgacactgtgtcctctatccaaaaagccaatgctcctacaacggagaattgtactatgtcctgactgaaaaccatcctccatgtcatttcatgtacacaccactagtaacaccaccaataactaaataactacttcaccacactctaat

SEQ ID NO: 1024 - DNA, 427 bp, Lilium asiatic
  unsure (1)..(427): unsure at all n locations
  Clone ID: LIB3229-020-P1-K1-H10
gctaaattgaaaacccctacagcttctgaaatcctgacaaatgatgaagcctctgaagatgacttatctgatatgataaaaaatgaagaagacgagtttgagagaccatccaccgaagggaatcttcgaaatatggacttttctgttgactcagatagtgaaaaaccacgacggagccaagaatcaggaaattctggcgacttaggatcagaaaacggtgatcttctcaaatctctgtctcgagtagatgagatggttgcagtttcttccaacttcgatacttcttcaagaaacatgatggagtccccaggagaaagtccaggatcatggaactcacaccttcaccatcaattttcttatgcacaggaggcatcagatgttgatgcctntgtggattctcctacaggcagtccagcattttggaact

SEQ ID NO: 1025 - DNA, 213 bp, Lilium asiatic
  Clone ID: LIB3229-020-P1-K1-H11
gagaggctgagaatgatgagagaagaaacgaaagtcagatgaatgtgtatctgattgagaagtgactgggtaccagaagcatatttcccttaagatatattccaagttctactttgtttaactttttaatttgattgcagaagtttgcaatggaaatgaatgtaacaaatctccttttaccgaagatcaaaattttacttaatgtctacgaat

SEQ ID NO: 1026 - DNA, 218 bp, Lilium asiatic
  Clone ID: LIB3229-020-P1-K1-H12
acgtataggctgagaatgatgagagagtatatcgaaagtcagatgaatgtgtatctgattgagaagtgactgttttctcagaagcatattccccttaagatatattccaagttctactttgtttaactttttaatttgattgcaaaagtctgcaatggaaatgaatgtaacaaatctccttttaccgaagatcaaaattttacttaatgtctacgaat

SEQ ID NO: 1027 - DNA, 227 bp, Lilium asiatic
  Clone ID: LIB3229-020-P1-K1-H3
gggtggtgttaccattgcccatggcggtgtcctccccaacatcaacccagtcttgctgccaaagaagaccggaaaggagggtacagagcccaagtcaccaaagaaagctaccaagtcccccaagaaggctttatagttgttgatttgattttggtcgcttgtatgtaatcccctagattacatggaacttggaattatgaaatttgtctgcccgtgttctgaattgg

SEQ ID NO: 1028 - DNA, 274 bp, Lilium asiatic
  Clone ID: LIB3229-020-P1-K1-H7
cccactcttccagtcacttttcctttttgtcaatggacctcctctgggacgtgtgaatcatatctaaagttaatggacccgccacccaatttacaacaacttgactgaataaaccctaactttaccacacttacttctgtaaggagggcttgaagaataacacagatggcggagggtgagttttttgaggctgcgaaagaggatacgaaaccatttcctcaagaaaagaaggatgatcattaggctgtggatgctgtattgattaaagccattg

SEQ ID NO: 1029 - DNA, 410 bp, Lilium asiatic
  Clone ID: LIB3229-020-P1-K1-H8
gttggttatcaaccaactcttgccaccgatcttggtggactgcaagagcgtattacgacgacgaaaaagggttccatcacctctgtgcaagctatatatgtgcctgctgatgacttgacagatcctgctcccgccacaacctttgcccatcttgatgctacgactgtgctgtcacggcagatctctgagcttggtatctatcctgctgttgatcctcttgattcaacatctagaatgctttctcctcatgtattagggcaagagcactacaacactgcacgtggtgttcaggaggttcttcagaattataagaatcttcaggatatcattgcgattctagggatggatgagctcagtgaagatgataaattgactgtggcccgtgctcgaaagatccagcggttccttag

SEQ ID NO: 1030 - DNA, 149 bp, Lilium asiatic
  unsure (1)..(149): unsure at all n locations
  Clone ID: LIB3229-021-P1-K1-A1
actttatattatccaaacttacccacccgatgatgcgtccacatatattttgtatattgccaccnaaanncaattcactatcccccctcctacaaacacccaactattaaaacccattcattacccaacttaatcccctttcaacacaa

SEQ ID NO: 1031 - DNA, 85 bp, Lilium asiatic
  unsure (1)..(85): unsure at all n locations
  Clone ID: LIB3229-021-P1-K1-A10
tctatatgatccaagcttacatacgcgtgcgggctacntcatatctttggtagagtaccacctaacatcaattcactctccgtac

SEQ ID NO: 1032 - DNA, 420 bp, Lilium asiatic
  Clone ID: LIB3229-021-P1-K1-A11
ccacgcgtccgaagaaagaaaaaaaagtagtgaagattattcaccatggatatgtgtcttaaagccttgggacatgagctggtcctctgattgattttgaaggagtttttggtaagcaggcaagatcatacattcaatcaaaccgtgaatgacatccggattcgagaagtcgctgtctttaccaatgaactccccgtcaggtttgcgggggcagaaactgaataaggaagcattgtccttcgccaagggatcctgatcctgaggcgttaaggtatcttggggagactactgtagaagcatagttggtaatgaaataaggacactccaaaatattgaataaattgcgattagaaggagggcaaacctttgatttcatgttaacggcatgatcgtcagcaccagtttgtacatcttgagaag

SEQ ID NO: 1033 - DNA, 71 bp, Lilium asiatic
  Clone ID: LIB3229-021-P1-K1-A6
aaaaaaaaaaaaaaaaaaaaaaaaaatttaattaaaaaaaaaaaaaaaaaaaaaagggagggaaaaaaaag

SEQ ID NO: 1034 - DNA, 432 bp, Lilium asiatic
  Clone ID: LIB3229-021-P1-K1-A8
cccacgcgtccgcggatgctgccaaatattcgcttaagcagaattcgatgcccctgcctccatggagatcgttggcttacttgcaagcgaagtggcaatcaaagtttgagaggaagtacaatgtagatggacacgaagtacacggaggcagttctgatcacgagcagtgcattgggcatttgcggaggttgaaatcgtccattcagtctgaaatggaaacggaggggatgttcaagcccattacgaatgacaagaaaaggagggttaagtctgagaggttgaggccttccttccttcgttgctgatcgaggtgaactggatctaaaaatataacaaaaatagcaaggaaaatcggatactttttgtttgtcaggtcccttttgagtttcgaataaaacaggaccccaaactactggaggatcgtcagtggta

SEQ ID NO: 1035 - DNA, 402 bp, Lilium asiatic
  unsure (1)..(402): unsure at all n locations
  Clone ID: LIB3229-021-P1-K1-B1
atcacccccatcgtacagctcaccgaggtcgccgtcaccaccggcgaggaggacgaggacgcccttctagatctgaaggcaaagctctatcggtttgacaaggacggcaaccagtggaaggagcggggcactggcagcgtcaagctgctcaaacacaaggataccggcaaggtccggctggtgatgcggcaggtcaagacgctcaagatctgcgccaatcatctagttcttccgtcgatcaagttgcaggagcatgctgggaatgataagtcttgcgtgtggcacgctacggacttctcggatggggagctcaaagatgagatgtttgctatcagatttggatctgttgagaattgtaagaaattcanggagatggtggaggagatagcggagtcacttggg

SEQ ID NO: 1036 - DNA, 203 bp, Lilium asiatic
  unsure (1)..(203): unsure at all n locations
  Clone ID: LIB3229-021-P1-K1-B12
cttgcgcgtccgcccacgcgttcgagtgaatctggagattgaggggattgagagtggggctactatcacttgggacatagtggtggggggatgggatgttgngtatggtgcttgatttgtgccgactgctgtagggagctacacgatttgctttggtttttatgatggtggtttcctgttacttctgattagctttgttgctc

SEQ ID NO: 1037 - DNA, 237 bp, Lilium asiatic
  Clone ID: LIB3229-021-P1-K1-B3
gtggataggaagattctaaaatattaatttattatacttgaaataatggaaatttacattggaaataggaatgccacaaaatcatgaaatgatatgatttgaggttattctcttcaccatcattgattatgtcaccacatcatctttttgttgtaccacagaattaaataaataagcacagaaccataggtagaacagttcaatggaacgtgttttaaaagaacaaaaaaacccagc

SEQ ID NO: 1038 - DNA, 367 bp, Lilium asiatic
  Clone ID: LIB3229-021-P1-K1-B5
tttctcttctttggtaacgatgtcttcttgctgtggtggaaagtgtggctgcgggtcttcctgcaagtgtggcagtggatgcaatggatgtggtatgtatcctgacttggctgaggggagcactgcctctaccactatgatcatggggtttgctcctgccaagggggagtttgaggggtttgagatgtatgctgagaatggtggctgtggctgcaagtgtggtgataactgcaactgcaacccctgcaagtgtggcaagtgatctctccatggaaaagaggatgtagggtttgataccctttgtttacttggttctgctgtagtgctgaataatggccatgggtttatttgatgcaagtctttttgc

SEQ ID NO: 1039 - DNA, 382 bp, Lilium asiatic
  unsure (1)..(382): unsure at all n locations
  Clone ID: LIB3229-021-P1-K1-C1
gttctgtgaaaaagagtaagaagaagagatcgaaggctgaatctgagcccatggctgtggatacccagaatggggaaaatgggtctgctgtagaacagaatggaactggcaaaaagaagaagcaccgcaaggtggatgatggcagtattcctatggatgttgaagtgaagaaaaagaaaaagaagaaaacccattcagaagagtagctttgagtgtcagaaatgcctttctttatgatcatcttagtattgtttacctactgttttataggtgtgtggactttgactgcctttcaacttacaatttttgtaacttattttggtttttttatggaggaaaatcttagtatgttagctggataatatattntgttatggtgggg

SEQ ID NO: 1040 - DNA, 286 bp, Lilium asiatic
  Clone ID: LIB3229-021-P1-K1-C10
gagagtaggttggcggagcttttatgtgcaggagcatgcgtcatgccattgtcagggcctaggatcgatactagcgagcgaggcaactcaacctactcccggcattaagaggagcttgctgtattgataaacacagctttctgtatgcctgatgtgcagggctacaatttacactgcttgacgcatccggaggcctatgaatgatccgaagaccaggtgctggagggctagttttgtcgctccgcagctcatgatggagacaattcctggaaaaggataaaatgcc

SEQ ID NO: 1041 - DNA, 369 bp, Lilium asiatic
  Clone ID: LIB3229-021-P1-K1-C11
gcaaaacattttataagacaaagtaaatgatatgtgaagcctgaccacactttgtaccgtggatgttctagtaccacatacccgttttggtaccacgaaccaaactgacctaggtaacattggttgggccacatgagtgttgaataagtaaatctccgaccatgccatgggtgtccattgtgggaggtagaaaacttactaagccgttgatgtcgacgccaccatggatgagtttgatgtgggaggaagtacgacatgactcatcaatacattatctttacgtgagcccaaaatgatagtcccggagtcatagtgtatcacgggtatattgcgattcattgttggcagatgctgtatttgtaagatgat

SEQ ID NO: 1042 - DNA, 393 bp, Lilium asiatic
  unsure (1)..(393): unsure at all n locations
  Clone ID: LIB3229-021-P1-K1-C12
gggagtgagatgcccagactgttccttatacatgaattcaattccatttgattggcactcctgaattatattcaggttttntccccggaatgcgtaactctcactttttttcatttttctatcatattttttttgcaccctttttttaacattgtttctaatattttttattcctatttttcttatatattttttttcctttattctttttgaaaaatttttttctctttctcaacttttttcatatctttttttttttacatttatttctttttcttctctttttttttttacctatattttttttcctcttctaattgtgttagtgtaatttatttcttttcccttatgtttttttctctacatattatattttttttctctcattttttt

SEQ ID NO: 1043 - DNA, 115 bp, Lilium asiatic
  unsure (1)..(115): unsure at all n locations
  Clone ID: LIB3229-021-P1-K1-C2
atttcttttcccatttctttttctcccagtacttttagctttttagtgttggccagtagcattgtcatgttcagatgtaatacatcctgcaatttattttgaacatcctgccntt

SEQ ID NO: 1044 - DNA, 324 bp, Lilium asiatic
  Clone ID: LIB3229-021-P1-K1-C4
gtttttatgtgtccccgtaaggtatgacgcaatcactattcttatctcaattcgtatctcaacattttctgtggtgttgccattcagatctgtgccggtctatgtcgattgctgcaagttgacgtggtttatgatggattctgcaccataatactgtaacttttggtatttcaatcagatgttgaggtagagatgtttcttattattttcctgtcatgccagagctttatcatgtcgggctctcttacattgcagtctgtaagacttataatgtcattatgattgttgttatattttgggggagattgtatgtgattaatttga

SEQ ID NO: 1045 - DNA, 306 bp, Lilium asiatic
  Clone ID: LIB3229-021-P1-K1-C9
cggacgcgtggggctgtgaagccgaagcctaaatctgctgctgtgaagccgaaggcgaagtctgctgctgcaaagccaaaagcaaaggctgctgcccccaagctgaaggctaaatctgttgctgcaaagccaaaagctaaggctgcagcgccgaagccaaagactgccggtcgccctgctaaggcagctaagacctcggctaaagcagctcctgggaagaagcctgcaccggttgctgcaaagaagccgaagtcagtgaaaaaagctccagcggctaagaaggctccgttggccaaaaaagctacg

SEQ ID NO: 1046 - DNA, 76 bp, Lilium asiatic
  Clone ID: LIB3229-021-P1-K1-D1
cggacgcgtgggaaaataaagagtatgtttgaattatggagaattgggtacatgtattacaactcttaccattttc

SEQ ID NO: 1047 - DNA, 297 bp, Lilium asiatic
  unsure (1)..(297): unsure at all n locations
  Clone ID: LIB3229-021-P1-K1-D2
cccacgcgtccggacaccttctcttctcaccaactccagctcaaaacctccctttcccctccgtctcttccatcctcaacaatcgaagccatgggcaccgaatacgattacctcttcaagctcctcatcatcggcgactcctccgtcggcaagtcctgccttctcatgcgcttcgctgatgatgcttacatggatacctacatcagcacgatcggngttgattttaaaataaggaccgtggagctggatgggaagacggtcaagctgcagatttgggatacagctgggcaggagcgc

SEQ ID NO: 1048 - DNA, 343 bp, Lilium asiatic
  Clone ID: LIB3229-021-P1-K1-D3
tgaagagcacgctggggcgacacttgagattgcttccgaagagactctgtccatgttagagacccaagtaaagcaggcctaaccacaatgtcaaatatcatcgtctgtccaggtttgggaagtgtctttggtttcttagattggtttgaactgagtcttttaatacttgaattcttaaatttttactgttgctacgaaggcagcttcaacataccagcacgggaaatgaattctaagtggatttccatccttcttttgaataattagttactggtaactcttaattaaattgtactgcttaatttgtaatttttttttaatctgtaagactttttgaatagca

SEQ ID NO: 1049 - DNA, 332 bp, Lilium asiatic
  unsure (1)..(332): unsure at all n locations
  Clone ID: LIB3229-021-P1-K1-D4
cgngaagacctcgctgcgagcgtcacttttttatttcttctcgtagagactccttacctagttggttgcacccaatgcgatgggagtaggatcctctatagtcaaatatcatcttctgtccaggtttgtgaagtgtctttgttttcttagattgctttgaactgagtctttttatacttcgattcttaaatttttactgttgctaccaaggcagcttagccataaggcccgcacctatcgatcttcccaacaatttcacagcctgatttgcataatgagactctcgctttctcttaatcaataattggcactgctttattttgaaattttct

SEQ ID NO: 1050 - DNA, 385 bp, Lilium asiatic
  Clone ID: LIB3229-021-P1-K1-D6
caaacatgtgcttcttccaatcactgaccggaacccttacctttcagatggcacaagacaggctgctgcaacaaccactgccctagcaaagaaatatggagcaaacatcactgtcattgtgatcaatgacaagccgaaagagtcgatcccagaacatgatgctcatctatctaacatcagatggcacctttcagaaggtggatttaaggaatttgggttgatggagcgtctcggggatggaaggaagccaactgctatcataggtgaagttgctgatgatatgaatcttgatctggtggtcttaagcatggaagcgctccacgcaaaacatgtcgatgcgaatctgttggctgagttcatcccctgtccggtgttgctcctgccg

SEQ ID NO: 1051 - DNA, 328 bp, Lilium asiatic
  Clone ID: LIB3229-021-P1-K1-D8
cggacgcgtggggacaaagaattagacttcattcggatgaagaaaaggctaaaactaagaaagacttcacattatgacctcaagtcaaagctgctctttgttattcgcattcacggctcgcaagacatgcatccgaggtctagaaaaatcctgaattcattgaggttgagacaaaacctcaccggcgtgttcgtcaaggttaatgaagcaactttgaaaatgctactcgctgtcgaaccattcatcacttatggctatcctagtttgaagagcataagggatttggttttaagaaagctgggggagatagagaggcaagggttctctc

SEQ ID NO: 1052 - DNA, 251 bp, Lilium asiatic
  unsure (1)..(251): unsure at all n locations
  Clone ID: LIB3229-021-P1-K1-D9
cggactcttttagacaaagaattatttttcattcggatgaagaaaacgctgattgttacttagactttgatattaggacctcaanncaaagctgctctttgttattcgcattcacttctcgcaagacatgcatcctatttctaaaaaaatcctgaattcattgatgttgaaacaaaacctcaccttcgttttcgtcaatgttaatgaaacaacttttaaaatgctactctctaacaaacctttcatcactt

SEQ ID NO: 1053 - DNA, 220 bp, Lilium asiatic
  Clone ID: LIB3229-021-P1-K1-E1
tggacaccagacacttgtgatagagatgttgttgaagccatggatgatgatcaagtccaggaaaattgatgctcaagtgaatctttcccgattaatttctacaatttgaaagtctgtaagtttgtactttgattcatgatgtattgaatgttaatgtttgggaacttaagataatatagtgatgaaacttttgtttgtgaaatgagattagaattagaat

SEQ ID NO: 1054 - DNA, 385 bp, Lilium asiatic
  Clone ID: LIB3229-021-P1-K1-E10
ggaaaagaaatacaccaaggaatgtgccgaagaagtgatcagatcattgggtgtagatctccggaaggtaaatgattgtgttggagatccggaggcagataaagagaatccagtgcttaaagctgaacaagatgcacagattggtaaagatgctcgtggggatgttactatcttaccgacacttgtcatcaacaataggcaatacagaggtaaattggacaaaagtgcagtccttaaagctatttgtgcgggctttcaagagaccactgagcctgctgtttgtttgagtgaagatgtagaaacaaatgaatgcttggaaaacaatggtgggtgctggcaagataaggcggccaatatttttgcttgcaaggacactttttcgtgg

SEQ ID NO: 1055 - DNA, 379 bp, Lilium asiatic
  Clone ID: LIB3229-021-P1-K1-E12
ctgcactgcctcctacttcaactgcttcacagcctacgaatcctctaaacaatggccagcaagtcggagttgctgttaagaatgtagttgatccatctataccaccaaaggaggcccgctgccgaggattactgaagaggaagggtgtggcttcgaggacttccgatgcattggcgtctctgaatgaaccgtggactggatcgaggctcggtcctcttccgtctttgggtctcgcttctcagaaagctgtgtcaggcgatccaggtccgattcagaggagcatatgtgatttgaacaggaaagtttcagttccgattgaaccgagtgacttggttgtcattgatagcgatgcgtcgtcttgaggaactatatcagatga

SEQ ID NO: 1056 - DNA, 335 bp, Lilium asiatic
  Clone ID: LIB3229-021-P1-K1-E4
ccggatccaaggctaagaagggagctggaggccgaaagggcagcagcggaccaagggccaaatcagtgacccgctccatcaaagctggcctccagttccccgtcggcaggattgggcggtacctcaagaagggccgctatgctcagcgtgttggctctggagctcctgtctaccttgctgccgtccttgagtaccttgctgctgaggttcttgaattggctggtaatgcagctcgggacaacaagaagaaccggattgtacctcggcatgtgtgcctggcggtgagaaatgatgaggagcttggaaggctgttgggtggtgttactattgctcac

SEQ ID NO: 1057 - DNA, 335 bp, Lilium asiatic
  Clone ID: LIB3229-021-P1-K1-E5
cggacgcgtgggttggacctttagcaccactggggctttggaagctgcttacaaacaggcaactgggaagtccgtttcactatctgagcagcagctggtagactgtgcctacgcattcaataacttcggatgcaatggtgggttgccgtcccaagccttcgaatacattaaattcaatggtggccttgacaccgaagaatcgtacccctacgccggatccaatggcatctgcaacttcaaatccgacagtattggagtcaaggtcaccgactcagttaacatcaccctgtgagccgaggatgagctaaagcacgcagttgggttagtggcgtcag

SEQ ID NO: 1058 - DNA, 304 bp, Lilium asiatic
  Clone ID: LIB3229-021-P1-K1-E7
cccacgcgtccggaaaagcccaggtgatgccgatgaagaacttgtctgacggccagaggagtagggtgattttcgcttggcttgcctggaggcagccgcagttgctattgcttgatgagccgactaaccatcttgacattgagactattgattcattggctgaggctttgaacgagtgggatggtgggttggtgttggtgagccatgactttcggttgattaatcaggtggcgaaggagatctgggtctgtgagaatcagactgtgactcggggggagggtgatattatggacttcaaagagca

SEQ ID NO: 1059 - DNA, 302 bp, Lilium asiatic
  Clone ID: LIB3229-021-P1-K1-E8
gaaaaaattcgcctcaactcaccaattctcaccttcagatcgatctcgccctccaattccacctctgatcaatcccaatcccttcttagaatcttgattcgggcggctatggaggatttggggctgtgatctgtgatggacgcgacgagaagctggttccagaagctacaacctcggggagataaggtgaaggccggggctgtgaggaagaaggagatggacggcgagccgcagatggaggaggcgccgtcaaatatcaccaagcagaatgtggccgccgcgaagcagtatattgagaatca

SEQ ID NO: 1060 - DNA, 222 bp, Lilium asiatic
  Clone ID: LIB3229-021-P1-K1-E9
gaaaaaattcgcctcaactcactcaattctcaccttcagatcgatctcggggtgggttccacctttgatcggtcggaatcccttcttagaatctagattcgggcggctatggatgatttggggctgtcatctgtgatggacgcgactagaagctggttccagaagctacaacctcggggagataaggtgaaggccggtgctgcgaggaagaaggagatggac

SEQ ID NO: 1061 - DNA, 296 bp, Lilium asiatic
  Clone ID: LIB3229-021-P1-K1-F1
actggattcgccaaggagattgcaaggattgcacaagggaagtattactacctaccgaacgcttctgatgctgttatctctgccacaacaaaggaagcattgtcagctttaaaaagttcatgaaacaatacaaagtagtggtttttttatggttgaggcataattcactcttttggtagggaaattgtaggtatctagagtggttcatgtactggcagtcatctgattatgaatctattaataataagttaaatgaagtttagggaaataacatcaactaggtttatctcttagca

SEQ ID NO: 1062 - DNA, 368 bp, Lilium asiatic
  Clone ID: LIB3229-021-P1-K1-F11
ggcaaccgtgagcagcagttccgcctctggttcgaccccaccaaggacttgcatgcctactccatcctgtggaggcctagacacatcatcttttcagtcgacgggaccccaatcagggatttcaagaatcttgagtcgagaggggtcggcttcccctccgaccagccaatgaggatctactccagcctctggaacgccgacgactgggcaacacagggcgggcgggtgaaggcggactggtccaaggcgccattcaccgcgtcctacaagaactttaatgcccagacttgcgtctctggggctagcccttctgacaacaagcctgctttggttgtcgacggggcttggtacaaccaggagctagactc

SEQ ID NO: 1063 - DNA, 238 bp, Lilium asiatic
  Clone ID: LIB3229-021-P1-K1-F12
acattgacgacttgctttgcgtgttaatgttgtttgatggagtctgttaaaactctacgaaaatctgagatttagtaaagcggctggtcagggtttcaatccgtccctgattgatgatgttcgaaagtcgctgacaaattaataattatatatatgcttgataacgttgacccagtctaactattctcgactggggtgggcagagttggtcgttattatggttataattcaatttaac

SEQ ID NO: 1064 - DNA, 355 bp, Lilium asiatic
  Clone ID: LIB3229-021-P1-K1-F5
taaatctggtcattgtgagcttcaggattcaaatgtggagaagatgttatgtttgcttttcaatcactgtgaaagtgaggaagagggggttcgtaatgtagtagctgaatgtcttggtaaaattgcacttattgaaccatggaagcttattcctgcactcaaggtgcggaccagcaatccagctgctttcacaagagctactgttgtcattgctgtgaaatattccattgtcgaaagacctggaaaaatagatgaaatcctataccatgagatagccacattcttgatgcttattagagatagtgatcggcatgttagacgtgcggctgtccttgctttgagtacggctgctcac

SEQ ID NO: 1065 - DNA, 434 bp, Lilium asiatic
  unsure (1)..(434): unsure at all n locations
  Clone ID: LIB3229-021-P1-K1-G1
ntccgcccacgcgtccgcccacgcgtccggagaatctgaagaaagaaaaccctggaattgcatttactgatgttgcatgagcacttggggaacgctggaagaagatgtcagctgaggagaaagagccctttgagtcaatggctcggaccgatcaggtacgttacaaggaagctatggctggttataagagtggagctgctcctgtaaatgcagagtctgacaatgcttctgaaacagagtaatagtcgtcgatgggaaattgatgttataaatcagctttggttcactgtagaagtggaattgtattagtttctacctgtattgtgtagggtggcgtgttgtaactggtgttatggctaattattatactgggtaactaatccctctttttcaatacaaggaactatccggagttgtgactgggtttaagggtt

SEQ ID NO: 1066 - DNA, 300 bp, Lilium asiatic
  Clone ID: LIB3229-021-P1-K1-G12
cgcaggagaggtacgaggtttgggagtagaagagctcgaaaaagaggcgtaggggattgaaggctatgagcatggagagtgactcacagtgatggaatgggagattatgttcaacggttcgggggattttaatgaacataatgcaatggtggttcaggtctgtagattttggaatctttgtatatccatcttaactgagaaattttgggtccctggttttcttttaattttaatggagtttatctagaaacctattcgagctatgttatcatggttattgttgattctttcttttctggc

SEQ ID NO: 1067 - DNA, 354 bp, Lilium asiatic
  Clone ID: LIB3229-021-P1-K1-G2
aaaaatagatggttatgatgattctgggaagacaggttctgttacccccctacggaaatcagttcgcacaatccagcctacttcaaagttgcttgaaggactgcaaacctcttcaagtgtatcgaggattcctagtttttctcatgccaaggcccaaccgaaagctacaccaccaagagggaaagctctgaaagaagggtcccgatgaaggtctgctagggatgactgaagcatgtataggagaaacagttctgggagatgagcttggcattatattctgtttattaattttggactttgccgtcattctgttatcattagatgtgaagttaatcggggttttaccttttaaac

SEQ ID NO: 1068 - DNA, 425 bp, Lilium asiatic
  Clone ID: LIB3229-021-P1-K1-G3
cacctattgccttcgccgaccgcggcccccttcaccgaaccggcagtctcctcctacaccaccgccgttcatcggattctccccctcccgcctaaccctagcccgccggcctcacctactccgatctaattctttgaattgctaagagtaacgatgaggagaaggcccggaattgctggattaaagacagccgctgctgctcgggatcaatatcgactggtcggagaaaatgtcgccaaaattcgaacagatgtgatgaaagaacaactcgagacattcaaatctcagttggaagacttcgctcgcaagcacaagaatgacatccgtaaaaacccacattcagatcacagtttcatgagatgtgtgctaaagttggagttgatcccttagcctctaataaaggattttggcagagctgctgggga

SEQ ID NO: 1069 - DNA, 369 bp, Lilium asiatic
  unsure (1)..(369): unsure at all n locations
  Clone ID: LIB3229-021-P1-K1-G4
ttttcatgcaaaaattagatatatgcatgcataacttagccagttctatgagttattgatttgattgtaacttcttgcaaatcataacttcttccaacctctccattgtggatcaagggtatataagggaccccagagatatttgaagatataaagagatcatatagagaccacacacaccaatatatgttgaaggtgattgatcagtggatttttcttcttagagaaggagaaaacccttgattccgtcatctaaaaaccaagacgatcttcatttaattttattctatattatatggtttggtcatatcttctgaatttttatacttcatttattatactaataaanaagagtgtgagggtttgaat

SEQ ID NO: 1070 - DNA, 260 bp, Lilium asiatic
  Clone ID: LIB3229-021-P1-K1-G5
caataatggaggtgatcagtgctctgtttgcttgttttgagattttaagtttggttgaacttgtttgattggtgtttgtaatcaggaaactctaattttcttgtttggagcgtaagttttataacaatctcggtgtttatcgagagaataaattactttgaagccacttgcagttaaatgttgcatgattttgggagcatttaggtttggtttatgatcaatatttttggaatataaactactagatgcttagctaaaaa

SEQ ID NO: 1071 - DNA, 278 bp, Lilium asiatic
  unsure (1)..(278): unsure at all n locations
  Clone ID: LIB3229-021-P1-K1-G7
tctagatcagcagagcagcccagccctttttttttttttttttttttttttatttttatattttttaaatgttttaagaatnanatttttttttttttttttttttttttttttttttttttttaaaacccccacccggggttgttaagccaaaaacaattttttaaaaaccctaaaaaaaattgcttatagcccgggctcccccaaaaacttaaaaaggaacccctttaaacccccaaccccattaaatcccaaaaacttattccaaccctccctta

SEQ ID NO: 1072 - DNA, 403 bp, Lilium asiatic
  unsure (1)..(403): unsure at all n locations
  Clone ID: LIB3229-021-P1-K1-G9
agaaggggaagccagatctgaggaagaaggtgatgccggctgtcattgttaggcagcgcaagccgtggcgccgaaaggatggtgtttacatgtacttcgaagataatgctggtgtcattgtgaacccaaaaggagaaatgaaaggttctgctatcactggacctatagggaaggaatgtgctgatctctggcccaggattgcaagtgctgccaatgctattgtgtagtttcctgttgcctctgtagtttgacattaggagttttggcatctcttttcagtgttttgatagtttgttaatgttgttttcagaggtgttggatcatgtactcctgtcttggtattttaaatttggaacagaactagcatatttncttcataagcattaattaaagttgttggact

SEQ ID NO: 1073 - DNA, 438 bp, Lilium asiatic
  Clone ID: LIB3229-021-P1-K1-H1
ccacgcgtccgcggacgcgtggggcgatgtctgggcgtggcaagggcggtaaggggctcggaaagggcggtgcgaagcgtcaccgtaaggtcctccgcgataacatccagggcatcaccaagccggccatccgccgcctcgcccgccgcggcggtgtgaagcgcatcagcggcctcatctatgaggagacccgcggagtgctcaagatctttttggagaacgtcatccgtgacgccgtcacctacaccgagcacgcccgccggaagacggtcactgccatggacgtcgtctacgctctcaagcgccagggccgcaccctctacggtttcggcggctgattgggtatcgggtctgggggttcattttgattctgttttcttttagcctttggtggatggaaatctttggaggaatgttgctgaatttcgtttgctgaaa

SEQ ID NO: 1074 - DNA, 268 bp, Lilium asiatic
  Clone ID: LIB3229-021-P1-K1-H3
atcccggctcgctagcgatcagccgcccctctctactacgctctgctcaatcgacgtggagaaggctcgttccttcatgatcggtccccccacacccaaaatcgctcccacccctccttcatacctgaaaatcctgttttgacacgatccgtgtggcattctttcagaggcagtggttgtagaagagtgaggtggtgacggggattgcgaagggttgtgaagactacggacagctggaatgcatcctcaaatcttcgccaagaagcgc

SEQ ID NO: 1075 - DNA, 262 bp, Lilium asiatic
  unsure (1)..(262): unsure at all n locations
  Clone ID: LIB3229-021-P1-K1-H5
gttttccattgttgcctgcaaaactttgttttcgtgtcaggcctaaccatcaccgtggtcttccaggtcatgataggggagtnccttgccaattttgcaaatccgacaccccttacattgtcacagtggtgtgtgtgggttgagagcatttatctttatacccccatcatcggccactatgaggttctcagagggctcccaataaaatctattctgcctcacacaatctgttcgacagactcttccaagcactactgactta

SEQ ID NO: 1076 - DNA, 407 bp, Lilium asiatic
  Clone ID: LIB3229-021-P1-K1-H8
gacagtagtattagccgccttgattgagagaaatccttcttcctggaggatatggagaagcggaaatttacttatatttgtcatcctatatgcggtattgatctagtaattagaaaagaatgaggaccaaaagactgccatttatcctcttctatcccgataaatttatctattaagatattatccatttatggcatttaccttgaatgaaactgaaatgcgggttggtgttcacagggaattgtggtcactggtctatcctatagcatacaaaattggtgcatccagaagaaaggaccagtttttgcaacagcattctccccattgctcatagttttttcattctttctcaatacatttgtctttggaggtgttgcccatatccagagcacaattagtgcagtgct

SEQ ID NO: 1077 - DNA, 408 bp, Lilium asiatic
  Clone ID: LIB3229-021-P1-K1-H9
cccacgcgtccgctgagctgagacctgttatcagtactttgaccagacttttccacgaaacatccgagattcttggtggtgcccgagccaatgtaactaagaaacgtgaaattgaagacaattcacggaaaatcggtgctctatttgctaaattaaataacggtgacatatctccgaatgctgcgtccaaacttcgggaactgtgccaagctctagacaatggagactttgctagtgccttgcatatccaggtgatgttaactacaagtgattgggatgagtgcaacttctggcttgcaacactgaagcgaatgatcaagtcgaggcagaatgtcagagtgaattagggatacctatcgggatatgtgccttttttttatagttagattctccttttcttctcgagat

SEQ ID NO: 1078 - DNA, 226 bp, Lilium asiatic
  Clone ID: LIB3229-022-P1-K1-A1
tgttttgtaagggtagttactttcattttcattatcctggagtgtagcaatgacagctagtatgaataatggaaaccagtatcccaccctgactaagacaaaaccgtaagaacgtgtattttgtctactgaaggcctgaggtgccgttttcttttctgtatatttgatatttgaagcatgcattcctactgacgagctttaatacaagcggcttgtgttcaacagg

SEQ ID NO: 1079 - DNA, 231 bp, Lilium asiatic
  Clone ID: LIB3229-022-P1-K1-A3
tcctttgtcaatcttcattttccccctactttttaaagtttacttttccccttccgagtgtccagtttactttttcccttttgttaattctttgaatgactctaatttaatgtatcttttaccttgtacatgcgaaagatctttgaagccaaaacatggagagttgtaatgcttaatcgtataaaccgaagcccttatcttggccatcgttttatgccttttctacctttc

SEQ ID NO: 1080 - DNA, 84 bp, Lilium asiatic
  Clone ID: LIB3229-022-P1-K1-A4
cggtgtcatccccaacatcaatccggtcctgctccccaagaagacttttgagaaggggggggcagttgaatcaaaacctcctaa

SEQ ID NO: 1081 - DNA, 423 bp, Lilium asiatic
  unsure (1)..(423): unsure at all n locations
  Clone ID: LIB3229-022-P1-K1-A6
gcttaccagctgagccaagcccggttggcggctttggatcatttttctcttcgcccaaaccaaacaatccgagcccagagttcaaaatcggccagatctggtatccaagccaacgcagttccatctcgtcatggatcccaatcagggcaccgccgagaactacgcgaatccgaagacatgcctctttcacgtcctcttcaaggctgcggcgttggcgttctatgtgctgtcagcgcttttctttaacagcttcgtgatcatcttcgtggtcaccgtgcttctcgcggcgctcgatttctgggttgtgaagaatgttagcgggaggatactggtcgggctgaggtggtggaatgaaatcgatgaacaaggggagagtatttggaagttgagtccttggatcangagtcacttgcacgcatgaac

SEQ ID NO: 1082 - DNA, 362 bp, Lilium asiatic
  Clone ID: LIB3229-022-P1-K1-A7
cccacgcgtccgagctccgccaccatcgtcaaggtcaatacctggcttcggatgggcacaagaagaggacgatgaggaagccaaagaggaaaacgaagatgaacctgaggtggaagaggaagaagacgaagatgagtacgacaagcaggtcaaggaagttcatgctagtggcgatttccaacacttgatccatcaaccccagagaaactagatattcggcgttcagttcaattgctattagtgggaccttttgtaggtattggtttttctttcgctttcactgtctagtgtgtttggtctctgcttgaaatcttgtgctctttatataatccgtcccttggaacattggaatttaatactcg

SEQ ID NO: 1083 - DNA, 204 bp, Lilium asiatic
  Clone ID: LIB3229-022-P1-K1-A8
acgcaactttgacaatcttcatttgacctctactttttaaagtgaactttaccccttccgggggggcagtttactttatcccttatgttaattcttagaatgactctaatataatgtatcttttacctcgtacatactaaagatcttcgttgccaaaacatggtgagatgtactgcttaatcgtataaacccaaccccttatct

SEQ ID NO: 1084 - DNA, 402 bp, Lilium asiatic
  Clone ID: LIB3229-022-P1-K1-A9
gtcgatcatgtcggatgaggagcaccagtttgagtcgaaggccgatgctggagcttccaagacgtacccgcagcaggctgggacgattcgcaagagtggataccttgtgatcaaggggaggccctgcaaggttgttgaggtctcgacctccaagactgggaagcatgggcatgctaaatgccactttgtggctatagacattttcaatggcaagaaacttgaggatattgttccctcatctcataattgtgatgtcccccatgttactcgtactgattatcagctcattgatatctcggaagatggatttgtgagccttctcactgaaaatggccatacaaaggatgacctgaggctttcaactgatgatgccctgcttacccaaatcagagagggatttgg

SEQ ID NO: 1085 - DNA, 335 bp, Lilium asiatic
  Clone ID: LIB3229-022-P1-K1-B1
gggcttgctgatggactcatcgtttgcccaaaaagatcatcggagctgagagatatgtctcgctgaacatggactatttctgctggaatttctgccgtttaatgtccctgatctggacacagaatctgggcgagccggattttgatgtcaacacttatcatctatatactcaactctatgatgattgttcggaagtaactctatttcaaattcagattttcttgaagaactatgatgacttgatcccctcttggggtaagtaggcaaccacttggtggtgcaatcgtctgctttgttttaaattaaaaaactttgattttgatatttgatatttt

SEQ ID NO: 1086 - DNA, 423 bp, Lilium asiatic
  Clone ID: LIB3229-022-P1-K1-B11
gaaaagttcaagaaaggcaaaacagatgtttgcagaaatgttcaatgatggaaatgatatttatgtaccatcagatgatgaggaaactgagcagactctgatacgccagcgttttctaaagcagactgtggaaacttcgatagtgtccccattagatgaccaaaattcgagggaggtttttggtcttatcaagaagctgaatgttgctcctgattttaagaagaaaggaaaaactacaacatccagctttgatatgctgatgatgggaggaagcagcaagagctcttcaaagtcatcttttctgggtcgaacaacaagcagctcactttcatcatctcacaagcaaggacctgctgtccgtgcatacatatttggccgagatgacagcaatagcaggagcaacatttcatcagcatctgaaaa

SEQ ID NO: 1087 - DNA, 418 bp, Lilium asiatic
  unsure (1)..(418): unsure at all n locations
  Clone ID: LIB3229-022-P1-K1-B2
cccacgcgtccgctccctatcaccaacaaaaactaaagaccgcttgtcgactaatgtgcctggcgtcccacttgatgagaggaacttgataataaaggcactcaatctttacagaaagaagaccggtactgataacttcttctggattcatcttgataaaaaagtacctacgggtgctggtcttggtggtggaagtagtaatgcagcaactgctttgtgggctgctaatcagtttagcggttgtcttgctacagaaaaggagttgcaagaatggtcaggtgaaattggttcagatgttccattctttttctccaaaggtgcagcatattgtactggtaggggtgaggttgttcaagatattccaaatccgatacccttggatctgccaatggttcttatcaagccacangaagcatgt

SEQ ID NO: 1088 - DNA, 110 bp, Lilium asiatic
  Clone ID: LIB3229-022-P1-K1-B3
aaaaaaaaaaaaaaaaaaaaaaaaaaaaaaaaaaaaaaaaaaaaaaaaaaaaaaaaaaaaaaaaaaaaaaaaaaaaaaaaaaaaaaaaaaaaaaaaaaaaaaaaaaaaaa

SEQ ID NO: 1089 - DNA, 418 bp, Lilium asiatic
  Clone ID: LIB3229-022-P1-K1-B4
cggccacgtggacctaatgtgaaagggagcacactaaaagccaactaggaatcataccttgacactcctacataacacgccttacaccagatccagtattatctcactggactaacgaagggggatcacactgaaagaggacaggcgatgacttggaccctacatgactgtatggcaccaataccaggcggaaatcatcggacttagccgctggaaatgcactattacaggcgataaatgagctcattatccagtggtcaaaatattcctctggatatgctactataacaaactggtcaacacacttttaattgattataatgatatctgaacactgagtatgttacatgaagatgaggctctacggtagttgactttcatatgatgcctatggactttcagttaattaaaatgaagt

SEQ ID NO: 1090 - DNA, 397 bp, Lilium asiatic
  Clone ID: LIB3229-022-P1-K1-B6
tacctcaccgagaggattgaatgtggagggcgaagcggatagctgggattttggtgtaggtgctgggttttacctaaatgcgacccaggagaaatggaaaaactggcgcatgtatgactatgttgtgaaggagttaccaaaagttttagctgaaaactttgaacaacttgacacttcaaaggcatccatatttggacattcaatgggtggacatggagcattgacaatttacttgaaaaattctgacatgtataagtcggcatctgcttttgctccaatttccaaccctataaactgtccttggggtcagaaggcattttcaaactatttaggaagcaacaaatctgattgggaggaatatgatgccacatgcctggtaaaaaagtgcaacaaaatt

SEQ ID NO: 1091 - DNA, 389 bp, Lilium asiatic
  Clone ID: LIB3229-022-P1-K1-B7
gcttcgtgaggctttgctggaagacgggaccgctgatatcacagacgtcgtgaatgacatcttacaagaagtcgatgctgataaggatggacgaatcagctacaacgatttcgttgcgatgatgaagacgggtacggattggagaaaagcttcacgacactactcgagagggagatttaacagtctgagcatcaggctcgtgaaggatggttcggtaaacttggccagtgagtgaggcggtggcttgatttgtgcattaacatccttttgccccctgattattttgggttttcattagcccggtttgattggcctgctatgtaaccacgatctggtgtctggctgatggggtgcaatgtctaagcttcttgtatgcatccatgtgatgc

SEQ ID NO: 1092 - DNA, 416 bp, Lilium asiatic
  Clone ID: LIB3229-022-P1-K1-B8
acggccacgaatacaatccctatcaccaacataaactaaagaccgattgtcgactaagggggggggcgtcccacttgatgagaggaacttgataataaaggcactcaatctatacagaaagaagaccggtgctgataacttcttctggattcatcttgataaaaaagtacctacgggtgctggtcttggtggtggaagtagtaatgcagcaactgctttgcgggctgctaatcagattagcggctgagttgctacagaaaaggagttgcaagaatggtcaggtgtaattggttcagatgttacattctttttctccaaaggagcaagcatattggactggtaggggggaggttgttcaagatattgcaaaaccgattccttgggatctgcgcatggtttttgataagccacaagat

SEQ ID NO: 1093 - DNA, 366 bp, Lilium asiatic
  Clone ID: LIB3229-022-P1-K1-C10
cgatacttaagattggtttcggattgattatgtattgtgtctacttgattggtggtctgcataaaacatcaacattgtttgtttatgcacccacaagatgcaaaattgaacatcgttgggttgtctgtaagaaaacatcagaaatgtctaactagggaaggaatcttagtttttttttctcctttgggttgttgggtagacccatatggctcttttgggaactacgatcgtctcgatcctaccgtcaccctgggtacgtacttttggtctccgggaggtgcacttttagtctccaggaggtgcaattgtaatacggaactaatgtttctgatatgagcttagaataatgatgatgaatgataacgt

SEQ ID NO: 1094 - DNA, 425 bp, Lilium asiatic
  Clone ID: LIB3229-022-P1-K1-C11
aacgtgtttaagaataagagggtgctgatggagagcatccacaagtcgaaggctgagaaggcgagggagaagacgctgcatgaccagtttgaggctaagcgtgctaagagcaaggcgagtagggagaggaagcatgcacggagggaggagcgactcgcccagggcccagttgaacgagtacctgcaccagtagcagcacctgcacctgcacctcaggctgctgcggctcctaagaaaaccaagaagtaactcagctcaagttggtagtatctgctggattagtgcttttattttcctttagggtatttggaatgttatattatgatcatgggaccatgtagaagcctcataagatacatcttgcttctaaaactgcagctctttcatttttttgtgttttgatgagtatttccttttcattagtg

SEQ ID NO: 1095 - DNA, 77 bp, Lilium asiatic
  unsure (1)..(77): unsure at all n locations
  Clone ID: LIB3229-022-P1-K1-C4
aaaaaaataaaaaaaaaaacgacgggggaacaaaaanaaaaaaaaaaaaaaaaaaaaagacaaaaaaaagagggaac

SEQ ID NO: 1096 - DNA, 425 bp, Lilium asiatic
  Clone ID: LIB3229-022-P1-K1-C6
cttatatacctggtattggccataatttacaagaacattctgtagtattagtaagaggaggaagggttaaggatttacccggtgtgagatatcacattgttcgaggaaccctagatgctgtcggagtaaaggatcgtcaacaagggcgttctaaatatggggtcaaaaagccaaaataagtgatttgtttttagcccttataaaaagaaaacggattcttggacctctttcacgctcatgtcacgtcgaggtactgcagaagaaaaaactgcaaaatctgatccaatttatcgtaatcgattagttaacatgttggttaaccgtattctgaaacacggaaaaaaatcattggcttatcaaattatttatcgagccttgaaaaagattcaacaaaagacagaaacaaatccactatctgttttacg

SEQ ID NO: 1097 - DNA, 261 bp, Lilium asiatic
  Clone ID: LIB3229-022-P1-K1-D10
gatatttcgaagatatttcgaagatattgttggtggtttggtattagcttcttggcaatgtggtcgggtggtttggtattagcttcggcagagtggtttggtactagcttcttagtaacgtggtctgccgatttaaaaaatagacagcagaagattatgttgttttgtttcatttttatttgctgacagaggactccaagaagattacaatgtgattatctcaagctcgccatttttgattgaatacaaaaatatttttcc

SEQ ID NO: 1098 - DNA, 417 bp, Lilium asiatic
  Clone ID: LIB3229-022-P1-K1-D11
gacaaggcattctacgaggaggaggtgaaaaggctctgtttggcatttgagcaacagttccattacggggttttctttgcatacatgaggctgagagagcaggagatacggaatctgatgtggatcgcagaatgtgtagcacagaaccagaaatccagagttcatgacagcgtggtcttcattttctaaacacttcacccgaagtcagaactaaaagcgatccagtcctacagtttgcttgcaaaatatttttctcctatttaagccaagatcattacgctgtacgttcttgttcgtcatgacatggccgaaataatttgtgaattatcagaccgatgtgttcaaagatctggtgtacaggtatatttctgcgacagcaagttggacaaaatgtggttttgtcaagaaacaataaat

SEQ ID NO: 1099 - DNA, 420 bp, Lilium asiatic
  Clone ID: LIB3229-022-P1-K1-D12
gaagacctctcgttctctgagcctccttcatccatacactcttcttagtgacagagttgagtttggggacgaaggagtaggaagtggtagatctctgttagtttagtttttttttttcttttactttcgagttgtagttctaaatatttctatctgttcttgtctgtaatcatgaagtttacttatgtctgtaacttacttctttttttttaatataatcgatgtcattttattaaggcttgttcaacaagttctctgcgatattgcagatgtacatcatcgtcagttatttctttagttaaagaataatcctgtgagagactccttcctcataggagctctctcacaggacgcatcatacaacaatatttctttagagttcactggaatctttactggctagtagtttcaacaaatggc

SEQ ID NO: 1100 - DNA, 420 bp, Lilium asiatic
  Clone ID: LIB3229-022-P1-K1-D2
cgccggtccctcctcgccgccgctgctgcaatcatgggtatctcccgtgactccatgcacaagcgccgtgccaccggcggcaagaagaaggcgtggcggaagaagcgaaagtacgagctcgggaggcagccggcgaacacgaagctgtcgagcaacaagacggtgaggagggtccgtgtccgcggtggcaacgtcaagtggcgggcgctgcgtttggataccgggaatttctcgtgggggagcgaggctgtgacccgcaagacgcgtatccttgatgttgtgtacaatgcttcgaacaatgagcttgtgaggaccaagacgctggtgaagagcgccatagtggaggttgatgctgctccattcaagcagtggtatttgcagcactatggcgttgaggttgggaggaaagaagaagtcagc

SEQ ID NO: 1101 - DNA, 133 bp, Lilium asiatic
  Clone ID: LIB3229-022-P1-K1-D3
cactactgtatctgtattatgtattgtccaccgtgtgcgtattatgtattatgtattatgaataataaggagaaggctcacgatcgtgcggaccatctcctgttgattttcgagctatatatatttactattt

SEQ ID NO: 1102 - DNA, 365 bp, Lilium asiatic
  Clone ID: LIB3229-022-P1-K1-D4
gtgtcttcaaatactgcttgtagtgggttttatgtcaatatttttatattataaggttgggggtattatatattttatatgtattttatattatcaattattttaatttttattcttataatttttttatatatttttattttttatttttttttttttttttttttttttttatttatttttttttttatttttttttttttattttttttttttttattttttttttttttttttactttttattttttttttttttttttttttattttttttttcttttatatctttttttattcatatttttattattttttttatttatttttttttattttaatttttttatttctattttttatttt

SEQ ID NO: 1103 - DNA, 417 bp, Lilium asiatic
  Clone ID: LIB3229-022-P1-K1-D5
gagcaggtcttatgggctgtatatgagcagttctctctacgatcgcccagttcctgctatatctgggatttctgatccatttggtggaaaccaggctcgccactattcattggagccccttgtgagctctggcttgtatgataggctacctggcaggtactccatgtcaggtatgccatcgtcatcttattttgcgggtttgcaagaaaggccagatgctgattactctcttccagctcacttgtcttatggctctggattacatgagaaaccatctgggggttactctctccgttatccatagtactgcgggaaaatttttctgtgccttgaggttctctcttgaaagttcaagaactggaagtgtttggttttcaaagttaaactagggaaactgtgtcttatgtcaatataaaa

SEQ ID NO: 1104 - DNA, 367 bp, Lilium asiatic; identical to SEQ ID NO: 832
  Clone ID: LIB3229-022-P1-K1-D6

SEQ ID NO: 1105 - DNA, 411 bp, Lilium asiatic
  Clone ID: LIB3229-022-P1-K1-E1
gttttgcgcagaccgtcaagcaacagaccgacgcccttctcgatcgggccagacgagctcgagctccggccatggcggatcggaatcccgctccgttaacctgcactcactgcgccggccctctcgccaagcacatggaaacaagcaagtggaccgtctccccgctgatccgcgacagtttctccatgattggatctgctgttggtgggatatcgagtgctttttatgggtttaaccatgctatgcctgttgttaggaggtgtgtgaaggggcctatgtggatacattttcttgtcggtgctccgcctgtaatggtggtctcctcggcctgtgctggtttggcaggcggtgctttaccagcccttgctcagctggtctcctcatcgttccatgcagctatgtcctctccgt

SEQ ID NO: 1106 - DNA, 250 bp, Lilium asiatic
  unsure (1)..(250): unsure at all n locations
  Clone ID: LIB3229-022-P1-K1-E10
ncgagccncnaaggggnanacggaagcacccccaggacaagcaaccccangggggggggagcccggaaccggcgggggaggagcaccagacgcacgaggccagcagagacggagcccacagggagcacgaagcacggcacggggaggacgagacaccggcgagagggggaacacggaacggcgcgagagcgagaaggagaggcagaggaggagagggacgaaaaggaacacgaggcgagaagagggggca

SEQ ID NO: 1107 - DNA, 381 bp, Lilium asiatic
  Clone ID: LIB3229-022-P1-K1-E11
gtgacatcaaggagaagcttgcatatgtggctctggactatgagcaggagctagagacagcaaaaagcagctcatcagttgagaagaattacgagctgcctgatggccaggtcatcaccattggagctgagcgcttcagatgcccggaggtcctgttccagccctcgctcattggaatggaagctgctggcatccatgagaccacctataattcaatcatgaagtgtgatgtcgatatcaggaaggatttatatgggaacattgtgcttagtggtggatcgacgatgttcccgggcattgctgaccgtatgagcaaggagatcactgcactggctcctagcagcatgaagattaaggtggttgccccaccggagaggaagt

SEQ ID NO: 1108 - DNA, 273 bp, Lilium asiatic
  Clone ID: LIB3229-022-P1-K1-E5
cgctgtcggatcctgcaactagggcggtttatgaccgggatctcgccggaggactccacttcaccttttcccggcggggttgggacgagaaaatggggaaacaatcgagatggaaaggcaattgggaggatcaacttgaaaggttgcaggaaaggggcatgggaaaaccagcaagaaatgtattctgggccgcttaaattccaccaaaaaagggtggattattaaacgaattatggtctctcttttaggtcgattgaaggcaagtggattatt

SEQ ID NO: 1109 - DNA, 385 bp, Lilium asiatic
  Clone ID: LIB3229-022-P1-K1-E6
agacactgcgtggagaacatctttctcgtgcaattggtaggctttctgggaaaggaggaaaaaccaagttcaccattgaaaatgcgacgaagacacgtattgtgattgcagacaccaagattcacatcctgggatcagtcgtaaacataaaggtggctagagactctctttgttgtcttattttagggtcacctgctgggaaggtctattccaatcttagatctgtgacggcaagaatgatggagagatagacttctgggggaaatgttattcttgttttattatgagtacttgaattaaagctaaggggatcttgattttgtgtcttctaggttccttttctgtaaaagatttatgttttcactatttatttggtggtgtgttg

SEQ ID NO: 1110 - DNA, 415 bp, Lilium asiatic
  Clone ID: LIB3229-022-P1-K1-E8
cccacgcgtccgatcaaaagctcgtcatttgggatcttcaacattccagtgtgcattgcacttgtgaccatgaagaaggtgtaacatgtctattatggctgggcacatctttcttcatagctacaggttgtgtcgatggaaaggtgcgagtttgggacagacgttcggggagctgcgcacgaaccttcaatggccatgccgatgccatccagtctctagccgtttcagggaacactctggtatcagtttcgctggatggcactgctcgtgtgtttgggatctcagagttccaatagaccatgatttgaagcaaacaacatcacaccacctttaagtggaacatcagctttcgagtatttatagatgctgctaaagtctactaagcagtgtatatgtttgtgtcctaacattatct

SEQ ID NO: 1111 - DNA, 126 bp, Lilium asiatic
  Clone ID: LIB3229-022-P1-K1-F10
cggacgcgtgggttgtttttgtttgtcgaactttcgtgttgttaggtcagtggttttgatcaaactatttgctttgctgctctatttggtcttttgttatgaatatttgatttgctacctgttaaa

SEQ ID NO: 1112 - DNA, 384 bp, Lilium asiatic
  Clone ID: LIB3229-022-P1-K1-F12
ggagcacaagaggtacaatttgaagaagctgacctatgaggagaggaaggctagtcttgttaagcgtttgaatgccctcaatgatgccaacaatgatgaagatgatgaggatgatgattgagcttttgttaaaccgactttaaattcgtagtttgtctgaagagttgaacttggtatttttgcgtttttatgttatgttggcagcttgtgttggtaaacttggttctgctctttcttaagtactttgaaattttgacttaggctgctcaataacttctaaaatttggctatcatttgatatgatagggcccttttattccatattgtggtggtttgttgatgcttgctggtatcacattagctaattagtcagtttttatgtct

SEQ ID NO: 1113 - DNA, 394 bp, Lilium asiatic
  Clone ID: LIB3229-022-P1-K1-F2
gcagcttgaggacgggaggactcttgctgattacaatatccaaaaggaatccaccctccacctggttctccgtctgaggggagggatgcagatctttgtgaagaccctcaccggcaagaccatcacccttgaggttgagagctctgacaccattgataatgtaaaggccaagatccaagataaggagggtattcccccggaccagcaaaggctcatcttcgctggcaagcagcttgaagatggcaggacccttgctgactacaacattcagaaggagtccacccttcatcttgtcctcaggctcaggggagggatgcagatttttgtgaagaccctcactggcaagaccatcaccctggaggttgagagctctgacactattgacaatgtgaag

SEQ ID NO: 1114 - DNA, 259 bp, Lilium asiatic
  Clone ID: LIB3229-022-P1-K1-F7
cccacgcgtccggtttggtcggtaaagagctaccttttcgagaacatttagactgctgcatggtatttatagaaattgtatttttgcgcttccattgccttttggggatttacaaaggacagtggtgcaatatctcaggctgttggcagtttatgatgtatcataaaattatcatccaccgtagccaaaccaaaataagcacttttccgctaatggcaaatgtaaacatagtttgatacagaggaaaccattatcgata

SEQ ID NO: 1115 - DNA, 400 bp, Lilium asiatic
  Clone ID: LIB3229-022-P1-K1-F9
gttgagacaaaacctcactggtgtgtttgtgaaggttaatgaagcaactctgaaaatgctacttgctgttgaaccattcatcacttatggctatcctagtttgaaaagcataagggatttagtttttaagaaaggctgtgggaagatagaaaggcaaagggttccgctcacagacaacaatctcattgaacaggaacttgggaatcatggagttatctgcattgaagacattgtccatgaagttgcgactttgggtccccattttaaagaagtgaacagcttcttgtggcctttcaagctaaagatgccagagagagggctgcagatgaataagaaacaattcaaagatggtggccatgttgggaatcgtgaagataaaatcaacgagcttattgataag

SEQ ID NO: 1116 - DNA, 386 bp, Lilium asiatic
  unsure (1)..(386): unsure at all n locations
  Clone ID: LIB3229-022-P1-K1-G1
ttcaatggcaatccgcccgtgacgaggatgatacctccgttcatattagagtcacctctggctttatcgtcaacattggtcatggggatgaagagcaagatgagttcatttcagtcctccaacaattgtggagaaggtgaccgttggttgagacacatatattggtagcaatgcccggttcttcgaagaaaatgaggaatcaaaatcattttgtaaaatacatgtaaattggaatcagtgtttagacgaacagagttaaagactctgttgtctattctgactagtatagaacccacacataatgtgtggccagacttagaatataagttaaacatgcagtttatatattgcgtangtgtaatggtggcacagtctcgatgtaccgt

SEQ ID NO: 1117 - DNA, 267 bp, Lilium asiatic
  Clone ID: LIB3229-022-P1-K1-G2
taggcactcaacaccagaaccattgtgccattttattcttcgtgtaggaaatcttgagggggcataaatttgtatgaaaaggcttttggcatggagcttctacgcaaacgagacaatcccgatacatgtatacaatagctatgatgggaaatggtcctgaagataaaaatgctgttctggagctgacctacaactatggagttactgaatatgacataggtaacgcttatgcacagactgtaattgaaaccgattatgtttattcga

SEQ ID NO: 1118 - DNA, 215 bp, Lilium asiatic
  Clone ID: LIB3229-022-P1-K1-G5
cccacgcgaccgaccacgcgacttttttttcgaaagaatgctactgctagggcggggatggagaccctcttctccacaaagcaagaagatatggtcgatgtgaatatgaagtgcgacaatgcatcattgcagacacaggcacaggccggaggatgcagctgttaacacctatgcaaaggactgataccatatgcagctgcgtgagtctcacatct

SEQ ID NO: 1119 - DNA, 422 bp, Lilium asiatic
  Clone ID: LIB3229-022-P1-K1-G6
gggagcaacgatggctgtcccagtcggtccccgcactctcctcctcaccctcgtcgtgacggcgctcctctcctccgcgtattcgttggatttcgagtactgcaataagagggcgcactacccggtcaaggtgaaggggatcgagatctcgccgctgccgatcaaacgaggcgtgcctgtgagcttcagtatttccgcatctgctggggagtccatatccaaggggaaactagttattgatgttgcgtactggataattcatgttcacgaggaaacagatgacgtttgcacaaagacatcttgcccgattgcaacaggggatttcgtgatatcccatcagcagacactaccatccctcactccaccgggttcgtacacgcttacaatgaagttgttgggtgaagatggcaaggagttactga

SEQ ID NO: 1120 - DNA, 387 bp, Lilium asiatic
  Clone ID: LIB3229-022-P1-K1-G7
gtcagaacaagacctgttgacattgaaaggcattttgaaccttatgggaagattgtacatgttcggataagaaggaactttgccttcgtgcaatttgaaacacaagaggaagcaactaaggccctggaatgcaccgatatgagcaagataatggaccgggtgatctccgtggagtatgcgctgagggatgatagcgaacgtggtgatgccagcggtggtagcccaagtagaggaggatacggcggccgtggtgctggttatggtcgatcggtgagcccgccataccgtcggagtcgtcccagtcctgactatggccgtcggcccagtccagattatggtcgtcgtcgcccaagtccaaagtatggccggcgccctagcccgatctat

SEQ ID NO: 1121 - DNA, 406 bp, Lilium asiatic
  Clone ID: LIB3229-022-P1-K1-G8
cccacgcgtccggccttcttgaggagatagttgctctgttggcatacgagaaccctcttgaatcaagccttggttatctactcggcggatcacaacgtgagtttgttgctgatgctgtgaatgcggtgatcctctcaacaaatcccaagattaaaggctctgatgactatacgacttcttcccttgagaggctgctaaggcagctaacagcctgcagcctggaaagaagggctctgaatggagatcaaggggatgctttctatctacacagagaacttctcagaagtggaaggaataaatcctgctagccaggtcatctgaccagctccatttgagtcattagtgttccccaaagtcatcttcttctagtcagccgcatcattcagcatgatattgcctttttttt

SEQ ID NO: 1122 - DNA, 407 bp, Lilium asiatic
  unsure (1)..(407): unsure at all n locations
  Clone ID: LIB3229-022-P1-K1-G9
cccacgcgtccgctcgacatgaacactgctgaggatgcgattgtgcgtttgactagagaggtcgtgccggggatgatcgtcactggcatggaggtggcagagatcgacggagctccgagaatggggccgacttttggagctatgatgatctcggggcagaaggcagcacatcttgcgctgagggctcttgggcgtggcaatgccctggacgggaaggtggcgcagccggagcttgtgttagcctcttcagagggtgatgttgtggaggcttanggttagggagcttgtgttggccttctctgaggcgatgatggagatgtttgggaaataagttagcatcgtgtggggggaataagatatgtagcctttattttcgatttggtccttcttctttttttctttggtat

SEQ ID NO: 1123 - DNA, 391 bp, Lilium asiatic
  Clone ID: LIB3229-022-P1-K1-H1
gggatggaccgagctcagaagatggtctttgtcgcagctcacgctaagccggagaggtgggacacgatcgaggaggagaaggatgcagagctcttcgccaatgggaatgatgatgtgctcaacgaggcctttggcgatgcctcctcactttaacattctgattttgtaggattggacctagagattctttcttcgaattcttctttgtggctttgttgttgtggtctacttactctaatgggaggcttgagtttcacgaattgaaatcatcttggttgataagatataattgccgaagaaaccgagacaggaagaatgttgtagcatttagattattgagaataatagtatattcgaaaaaaaaaaaaaggaaaaaaaagaagaagaaaaa

SEQ ID NO: 1124 - DNA, 376 bp, Lilium asiatic
  Clone ID: LIB3229-022-P1-K1-H11
cccacgcgtccgcccacgcgtccgcttttccgaaagattgctgctgctttgcctgggatggagaccctctcctcgacaaagcaagaagatatggtcgatgtgaatctgaagtccggcaatgcatcatcgcaatcacagccacagtccggtggatgcagctgttaacacctatgcaaagttctgatacatctgctgctgcgtgagtctcacagctcagcttccatcatactcttaagtagttccagtctctaaattctgcagaatatctatattaggagtgtcgaaattgttactatgatggctctacaagtctcctttattgtaatttgtagtagtataatcttttccgtatgttaatagaattttcatagtattc

SEQ ID NO: 1125 - DNA, 416 bp, Lilium asiatic
  Clone ID: LIB3229-022-P1-K1-H12
cgccacctccattcgaagcaaatcagcgatgtcgggtcgaggcaagggcgggaaggggctgggcaagggcggcgccaagcgccaccgcaaggtcctccgggataacatccagggcatcaccaagcctgccatccgccgccttgctcgccgcggtggcgtgaagaggatcagtggcctcatatacgaggagacccgtggggtgctgaagatctttctggagaatgtcattcgcgatgccgtgacctacactgagcacgcccgccgcaagacggtgacggcgatggatgtggtgtatgcgctgaagaggcaggggcgtacgctgtatggcttcggcggctgatgtgtttggtcttctgcaagctttagtggtgctcgtgtctggtgtctatttccttatgctgtcgagtgttaatcct

SEQ ID NO: 1126 - DNA, 263 bp, Lilium asiatic
  Clone ID: LIB3229-022-P1-K1-H2
gagcgacccgagggactaaacatcgggaccactgtgccatgctttgctgattggagagacatcttgagccggagcataaattcgtatgaaaaggctatcggtatggagctattacgctaacgagacaatccctaatacatggattcaataactatgacgggatatggtccttaatataaaaatgctgtactggagcttgcctacaactattgggaaaccgtataagacttaggatatgctcatcctcagtatgcaattgggcc

SEQ ID NO: 1127 - DNA, 428 bp, Lilium asiatic
  Clone ID: LIB3229-022-P1-K1-H4
agctaataaacccgatgtcaaaggaggagagatttgaggaagaaatgtgtttgtgtggttggttttttcattgcccacaaaggggtatttgtgggagtacaagtgttgtgcacacacacctttactatttacacaccacaaatatctttttggctatgctaaagctactcttgactttgctatcgccacttcttcacctagagttgtatatttacattaacatgcccccacaaactcaaggtgggtcaaacaacatgagtttgttcacgagaaattggaacctttgagttgggtgagcattggtgaagaagtcattgagaaaatgtcaactgttggccatgtcgttgaaaacgaggaagcccggacttgccgatgattgatcgtcaggatgatcgaacacgtcgggatcgtacgttgggagagaccgg

SEQ ID NO: 1128 - DNA, 419 bp, Lilium asiatic
  Clone ID: LIB3229-022-P1-K1-H7
cggacgcgtggggcctacttccccttacctctctcatggaagatcgcagagagatggagtggaagtcggtgccggctttcggcgagtgggagatgaaggacggagccatgccggactactccatggacttcaccaagatcagggagatgaggaagcagaacaagaatgatttgtcccgcaccagcatcggcaacgaggtagagctcatacctcgccctagaaacacccatcatgtttccggtggcgatatccatgactacgaggaccaccaccaccaccgtcatcagacgcccacggtaagcagaaacccaagatttgcttcaaaaatggtgtctgcaccgatctgatatttttctacatatccttctgtgttgcagacgaggaggaggatcctgagctacttcaactgctgtatgatt

SEQ ID NO: 1129 - DNA, 421 bp, Lilium asiatic
  Clone ID: LIB3229-022-P1-K1-H8
atcaattattgttttcgatatttccttatgatttgatttgagcaattgatcctttgatgatctgttcgcagtagtgattgatccctttcgatgaatcgatctctgatctgttcaaattagcgatcggattcagaaatcgagcgggtctgtgtctctcctgagaaaaagattaaatagacgatgagcagttttccttgaaatccatgagagacttggcatctgagctacttcattatttttttgggcattagttaaatgtgtgaagtttgcccaatctgggtaggggatgttgttcttaacactgtttgcttgagcagttagtgttgtatttagactgaattctgtgttaaactgatgcccttgattgcatatttgtgaaactaagattgctaatttaacgtattgaggtaatgtcagactg

SEQ ID NO: 1130 - DNA, 409 bp, Lilium asiatic
  Clone ID: LIB3229-022-P1-K1-H9
tgttgtccgcgaagctgtctctgaagaacttgcggaaggacatggcgatgttggtcttaaagatctaatgaacatgtcgaaggaggaaacggtggattatgttgctcggaacatgtggtaccctatttacagtcctcttgttcatgaaaaatgaaattttcaacgtccaccttttagttattagaagagaacaattatctatggagtttgggaatcgatctgcaaggtctcccgagaaatatttttaattaaatttattttgtatggtgaagcgaaacattttatttttgtactaattgaacttgaggcaacatttatactaaccaatctgcaaggtctcgcgtaatgtaacttgtgcgcttactgaaatatctgaccattatatataatacaatattatgttagaatt

SEQ ID NO: 1131 - DNA, 270 bp, Lilium asiatic
  unsure (1)..(270): unsure at all n locations
  Clone ID: LIB3229-023-P1-K1-A1
gggtgactatcatgcccaaggatatccagctggctaggaggatccgtggtgagagggcttgatcttgtttagggtgtcatgttctgcagttagctgcctttgaagttgtttgttgttgatttcaagtgttgggtttgttattcgttacctgcgaatatagcttaaatgcggntgcgaaactttggtgtattaagtatgtccgactgttcgtgatctggtttcgatttgttgcaaataattatttactgctttccaaattaaaaaatataa

SEQ ID NO: 1132 - DNA, 397 bp, Lilium asiatic
  Clone ID: LIB3229-023-P1-K1-A10
atctggtaagagtagtccttggtggattttacaaaaatgaatttctatcaaaataatgattagccaagagttgtgaccttctttgaggaacaaaaatctcctggacagatgatctttgcatagaccgtttgctatcacatattacacttcgaagggtcgcgtgaaactttgtagaccccttcttcatagagttaagttaggtgagataagggctaagaaccaccggtctattgagctattgcattcatgaaaatatttttaccaataagtgcagaaatgcacaatggcttgaaccttgcaatttagagggagcattgtctcgggaatcagtacgatgtggcatctaaccgctgcattctagggaattaaccccctgggcatgtatactgagacccgc

SEQ ID NO: 1133 - DNA, 290 bp, Lilium asiatic
  Clone ID: LIB3229-023-P1-K1-A11
gccgagctaactgcgcagctatcatgagcacattcttgcctagtttactgagcaacacatacgttgctctgggatgctgctacttatgctggacatgttattgacagagaattctagcagcagcagcagcttgctcgagaattgcatttgtaaaggtcgaaaatgtacctaaggatgtttgtcgaggcaggtcttgattgactgcagatatatagaataactatcttgttgataaaaaagagaaacggtaatagctgacatcgatcgagaaaaataaactttatgaaact

SEQ ID NO: 1134 - DNA, 412 bp, Lilium asiatic
  Clone ID: LIB3229-023-P1-K1-A3
cccacgcgtccgaccgtgagaattgtattaccaatcagagagaaaacaatatatacaatatgttcatgtgacaccaagtgacttattagtgtacaccacatattttcctaatattagccactaactaataaattagactacattagattagatatacaaataagtcaaaataacccctccccatgtcctcaaacttacggtggatcaaataatgtgagtttgtccactagaatttggaaccgctaagtggcataattttggtgaagagatatacagtcggctgaccagagcaagcatgtgtaagagtgattgttttgacaaagaggctagcgtacaaagtgcgtattaatctcaatgtgtttggtttgctcctgaaagacgaaattgttagctatcttgatagtactgatgt

SEQ ID NO: 1135 - DNA, 353 bp, Lilium asiatic
  Clone ID: LIB3229-023-P1-K1-A4
tttttaaatcctaattccaacttgattaaacagtaatcacgagttttcaacaataggatattcattgaaagtagaaaaatagggctacacccaaattaagttccaacacgagataactttatactcaacaagatcaatatccaaaatgaagcttcagccagagatgtcgatggatttgacctccggcttcttggcctcctccttggggactgtgacagtgaggacgccgttctccattgccgccttcacctgatccaccttagcgttctccggcagctggaagcgtcgcaggaactgaccgctgctgcgctcgactcggtgccaggtgtcggtcttctcctcctgctccctct

SEQ ID NO: 1136 - DNA, 402 bp, Lilium asiatic
  Clone ID: LIB3229-023-P1-K1-A5
ggccattacatctcaaaacctccgacgaatcctcgactctcccggaccgggaatgacggatccgatgcccgaggcagcgccggcgaaggagacggaggagcggccggtgcgtgtctacgctgacggcatctacgacctcttccacttcggccacgcccgatctctcgagcaagccaagaaatcgttcccaaatacatatcttcttgttggatgctgcaatgatgaagtgaccaacaagtacaagggaaagactgttatgactgaaagcgagcgatatgaatctcttcgtcactgcaagtgggttgatgaagtaattcccgatgctccctgggtgataacaccagagttccttgataagcacaagattgattatgtagctcatgattctcttccatatgccga

SEQ ID NO: 1137 - DNA, 353 bp, Lilium asiatic
  Clone ID: LIB3229-023-P1-K1-A6
ctgagtgatgccttctatgattgccagaatagcctgatagaaaagtcagcaattggagaaccaatttttgaattcccagatattaaggttccccctctccgaacagatgaagttcaactcgacgagaaaatcaaattatctccagaatgaatcaatacagtatgagtataagcactggttctctaaatttagcagactgtgcaaatggctgtatgatgagaccaaactctcttgtttttcaaggattagattttgtagctgcattcctgattaggagagctttcaccgaaggagacattccgtcccgtctaggagacaataaatccaaaatcgggaacacaacctcctttcta

SEQ ID NO: 1138 - DNA, 394 bp, Lilium asiatic
  Clone ID: LIB3229-023-P1-K1-A7
cttctaaacatggagctgtattagatccttgtgagattatgagctgttttgctatttcttaccggttcaaaaaaaaaaaaaaacgaagattcacatcacaaacttaacactcttaagataagaggagaccgatttaatgtctagttcatccgcggaaaccctagatagattagccgccgaagccatagagggtgcgtccctggcgcttcagtgcgtagacgacgtccatggcggtgaccgtcttccggcgggcgtgctcggtgtaggtgacggcgtcacggatgacgttctccaagaagatcttcagcaccccgcgggtctcctcatagatgaggccgctgatgcgcttcacaccgccgcggcgggcgaggcggcggatggccggcttggtgat

SEQ ID NO: 1139 - DNA, 402 bp, Lilium asiatic
  Clone ID: LIB3229-023-P1-K1-A8
ccgcgttctcaacaagatcggtctcgacaccaccgatctcgccaccctgtgcgggggtcataccatcggtctcggccactgcacctacttcaccaaccggctctaccccacccaggacaccaacatggacaagacgttcgccaagaacctcaagcacacctgcccggctgccaacacgaccaacacgaccgtgttggacatacgctcgcccaacaagttcgacaacaagtactaccttgatctgatgaacagacaggggctgttcacgtctgaccagtatatgcattctgacaggaggaccagggggattgttaccggttttgctatcaatcagtcgctatttttcgagagggttgcttactccattgtcaagatggggatgctgactgtgttgaccgggaa

SEQ ID NO: 1140 - DNA, 379 bp, Lilium asiatic
  Clone ID: LIB3229-023-P1-K1-B1
aatcagctaaaatcttctcttcaactccacattgatggtactagccctgtagctgaagatattggccgtcagctccttacatacggcagaagaatcccagttgctgagctttttgctaggatagatgccgttgatgcaagtactgtcaagcgtgttgcgaaccgattcatctttgaccaggatattgcaattgctgctatgggcccaatccagaagctaccagactacaactggtttagacgccgcacctatttactccgttattaggaattttgagtgtttttttgattctgcttctgaaacttgtactcttattaagttgagactcaaattttccaacatatgttgcagccatgtaccatgggatcatatgaccaga

SEQ ID NO: 1141 - DNA, 395 bp, Lilium asiatic
  Clone ID: LIB3229-023-P1-K1-B11
gttgcgagcatgcttactgtgtgacatgcatcctgagatgggcaacatacagtcagaaaacttcttgtccccagtgcaagaatccgtttgagttccttaatgttcatcgctcgcttgatggctgtatccatgactacatgttcgaggagagtgtgtgcctcctcctccgagccacttggtttgtccctctggttgtcgagccagggtatgcatatgaagaggtggatgatctttctcagtactatcacaactacgaggaagatgatgaggacgatgatgatgacacttacttccctagtagctcttcaagcattcgtattggtaatcggaggtggggcggtaatggctatgtgaggggtgggaggaaagaggcacgaccacgcactgttgaccag

SEQ ID NO: 1142 - DNA, 96 bp, Lilium asiatic
  Clone ID: LIB3229-023-P1-K1-B4
ccctctgttggcggcaagcggacgttctagatgaaatgagctagcggcctacgtgggcgggcgtatatggcgtatattgtgtcccatatattgata

SEQ ID NO: 1143 - DNA, 103 bp, Lilium asiatic
  Clone ID: LIB3229-023-P1-K1-B5
gccactcgtccgtaaaaacaaatgtcgaatcctcaactctcccggaccgggtatgacgggtccgttgcccgaggcagcgcctgctaaaagagacggaggagcg

SEQ ID NO: 1144 - DNA, 162 bp, Lilium asiatic
  Clone ID: LIB3229-023-P1-K1-B6
cccacgcgtccgggaaaaatagtttagtttactagtttgcttgttgtgctctatggatgttgtgatattatgcttggtttttatccgttactgtgtactggttcaataagaacttttttgtactgctgagattaagttttatttataatttggttttatgcg

SEQ ID NO: 1145 - DNA, 400 bp, Lilium asiatic
  Clone ID: LIB3229-023-P1-K1-B8
gttgatttaatcaaaagcagaacaagcgacatgactctggctataggtgatggggccaatgatgtttcgatgatccaaatggcagatgttggagttgggatatgtggtcaggaaggtcgtcaagctgtaatggcatcagactttgctatggggcaattccgatttttgaagagactgctcctcgtgcacgggcactggaactatcagagggttggctatctggttttgtacaacttctaccggaacgctgttttcgtattaatgttgttttggtacatcttgtgctctgctttttctacaagttctgctttgacagattggagtagtgtattttattctgtaatttatacatctgtccctaccatagtagttggtattcttgacaaggatttaagccaca

SEQ ID NO: 1146 - DNA, 393 bp, Lilium asiatic
  Clone ID: LIB3229-023-P1-K1-C11
ctccagtttaatatgggatcaagatgtctgcaagatctacatcctctccaaccttggatttgcagaaccaagcatgctactcattctcgtatttctcctaaatgcctcactgctgaagagggactcgggagtgttaagcaaacggtggaacgtaaggaccatatgttatgttatcctcaactgcatcccgatttttgtcctgcaaatggctatcgtttttgctggtcccagattcaattccgataagagtgatgggggaacgaagatcgccaagtacttcacaagaatctcctctttgaccaaagacagcagggtatgcacttatcccttgcttacaactatcgttctaggcgcattctatgccctcctcatcagctatgtaacatatgttgg

SEQ ID NO: 1147 - DNA, 173 bp, Lilium asiatic
  Clone ID: LIB3229-023-P1-K1-C12
aaaaaggttggtgtggcttcttgatagtatcagggagcttccaccaacccgggcgcggggcttgatagttttttgaatgctacacattttattctttcttcctgatgcctcactgcctagaccgggaaatcgcctgatgttccgaccaaaaaacactattaccatactttttt

SEQ ID NO: 1148 - DNA, 166 bp, Lilium asiatic
  Clone ID: LIB3229-023-P1-K1-C2
acatttgattaggaccaccgcctattaatattactatgtggtagatcaactaatggtggggggtcactatggtatattgttttttatactctactcggtcgatgaatcatcacacaactaagcatgtgtgttatttactggtgaaaaacataaaattaagggggaa

SEQ ID NO: 1149 - DNA, 143 bp, Lilium asiatic
  Clone ID: LIB3229-023-P1-K1-C3
cggattgatgaggaccaccgcctactaatattactatgtgttagatcaactaattatgtgtggacactttggtttctgtctttttttactttcattggacttggtatgttagacatcgaaacatgtgtgttatttactggtaa

SEQ ID NO: 1150 - DNA, 398 bp, Lilium asiatic
  Clone ID: LIB3229-023-P1-K1-C4
atttagtgcctgggcctgttcagctgttggaagaactgctcaggaggttgttaatgaagttcgaagacagtttattgagaggcctggtataatggaatataaagagaagccagattatggtcgttgtgttgctattgtggcatctgcttctttgcgggaaatgataaaacctggtgctttggcaatcgtatcacccgtagcaatagggattattttccgcattttgggtcatgccactgggcagcctcttcttggagccaaagttgtggcctcgatgcttatgtttgcaacagtatctggtattcttatggctctcttcctaaatacttctggaggagcatgggataacgcaaaaaaatacatagagactggtgctctaggtggcaaaggcagtgaat

SEQ ID NO: 1151 - DNA, 102 bp, Lilium asiatic
  Clone ID: LIB3229-023-P1-K1-C5
atctaaagccgcgggcagagaagatcaaggctccaatcatcatgaagcctacatgggaggtcatatatattctaaactatatccaatatacttgtcctttga

SEQ ID NO: 1152 - DNA, 404 bp, Lilium asiatic
  Clone ID: LIB3229-023-P1-K1-C7
cccacgcgtccgctttctggaccccgcgagagctccgagcaacggccacgtttccatactggccgatctaaggatttctaacgcttgccgcctgactttccaagcaaagcggtggagatggacaagtccagcggcctagcggtgcagcggcgcccgacgaagcggcggcgccggcggagcaagagtctcgtccgcagcgtggcggagtatctcgtctccgattcctacatgtacgccccgctcgttgatcccccgactcccgatcccgccgccgctgctgaaagcgtcaatggcgtcactgttgcagataaaagggtgtctgtggtgcagcttcagagtctttggcaaagttaattttctgcaacttcctgtcgactgaggtactggtgtgtgcaatggtgata

SEQ ID NO: 1153 - DNA, 402 bp, Lilium asiatic
  Clone ID: LIB3229-023-P1-K1-C8
cccacgcgtccggaaaccattcaaatcagaccagttccacaacacactgacagctattcagcatgggctacaatttattttcctgaaaccattcagataacacaacacacagacattatttaaactgctggaagcagtccatggtctcgattaaataggaatgtttaccaggcaaaatctagaggaagaaagatcagccaataaatacaccaaaaactccaatatcaacctacatgcatggagcacaggctgatcttagccttttcccttgcttgcgaccagcagatggctgcaaaaaaaaacaattagttgtcttgaattaagagcaatgttagaagagcatgatgcacttgaaatctcacatgttgttcaagcgaataaggaacgtgaaccctcttggag

SEQ ID NO: 1154 - DNA, 401 bp, Lilium asiatic
  Clone ID: LIB3229-023-P1-K1-C9
ggaaaatccgggcatgtccctcggtgaatcctggctgtgtgtcgacgaatcctcagtcgccgtccttcagctttccgtgggtgataccggagaaggaatctggaaatgccgttcagaggcttcgtgatgctatagtaaaaacccagaagaatgcaagaattaaagtcgatgaagacaccccaaatggccattatttgcaagcggaggttgacgggggatttggacgcgatgtaatagagttcttggttaaaaatgatgttgttgcctaccgatccatggccacgaaagtgacttacgtctacccatttacgacagcatttggcgactctaaagggcagaaagaaagggtgaacaaaatcgtcgaagagttgggttggtatgctccaagttttgagtcgatg

SEQ ID NO: 1155 - DNA, 405 bp, Lilium asiatic
  Clone ID: LIB3229-023-P1-K1-D1
gcggactctttctgttgacgggaaggtgatcaaggctcagatctgggataccgctgggcaggaacggtaccgagccatcacaagtgcttactaccgaggagccgtcggcgcattactagtgtacgacgtcactcgccattctacattcgagaacgtcgagcgatggctgaaggagctaagggtacacactgatccaaatatagtcgtcatgcttatcgggaacaagtccgatctccgccaccttgtcgcagtttcaactgaggatgcgaaaacctttgctgagagggaatcactctacttcatggagacgtccgcactggaagcaacaaatgtcgagaatgcttttacagaagtcctgactcaaatataccagattgtaagcaagaaggcagttgaaacaggtga

SEQ ID NO: 1156 - DNA, 336 bp, Lilium asiatic
  Clone ID: LIB3229-023-P1-K1-D11
aaaaaagctgtcaaaacttatcgataaatctggagggtttcataatcctgtgccatacgagagaggtgttaaactggtgaagtgcttgtccgttatttctgaagtggctggggctagaccaagaaattggcagaagtactgtgaaaaaaacactgatattttacctttcttgatgagaggtatatttaatttcggggaggaatctgtcgtacagtctcttaaacttctgaatttagcattttatactggaaaggacatgggccattcgatacagaaaatagaaagtggagatgcaggagtgagttctagcaagggtggtcaacagccttcagattc

SEQ ID NO: 1157 - DNA, 394 bp, Lilium asiatic
  Clone ID: LIB3229-023-P1-K1-D12
cggacgcgtgggttgttttgttactctgtttggctattttctggaaacattggaagcaatgcagagctctggtgaaagcttatgagatgaacccatttctggattcccctatattttgcttctggactccgatgctcttggtatatgccatctaccagactggaacagtttaggactcgttgcatacaccgcggcacatatctgacaaattgggcataggttgaagaaggtatttgtcagttttggctgcaagatgtgaaactgcatgtgataaatacacaatttaattgcgatagctgcaagtcagctgatcccgatacaaagatagttgtatttcgagcaacattgatgtgtgaattataattctacgcaggattttgtgaatttctgtgtg

SEQ ID NO: 1158 - DNA, 403 bp, Lilium asiatic
  Clone ID: LIB3229-023-P1-K1-D2
cccacgcgtccgcgcgccgtctgatctgggaggaggagatggctagcaagaggattcagaaggagctgcaggacctgcagagagatccgccgacgtcgtgcagcgccgggccggcgggggaggatttgtttcactggcaggcgacaattatggggccgggggatagcccgtattccggcggagtgttcttcgtcatgatccattttccgccggattacccgtttaagccgccgaaggtcaattttcagacgaaggtttaccacccgaacatcaactctaacggtagcatctgcctcgacatcctcaaggaacaatggagccctgctctgaccatatcgaaggtgcttctctcgatctgctcccttctgacggaccccaacccagatgaccctctcgtccccga

SEQ ID NO: 1159 - DNA, 115 bp, Lilium asiatic
  Clone ID: LIB3229-023-P1-K1-D3
cccactctttctttaacaatataatcttttattaaaagaaaactaccaacacgagcttgggggacctttttttttctttataaagatccaccaacaaaataccccccccccccta

SEQ ID NO: 1160 - DNA, 290 bp, Lilium asiatic
  Clone ID: LIB3229-023-P1-K1-D5
ggttgaaattggcggcggcggcggccatggcaccattcaacgtggtgcagagggagcggcgcgcgtacacccaggagaagaagcggcagctccatggtcagcctggcactggaaagctcaagcagcgcactgcgcccatcgccatctccggcaagcgcaagcgcaagctattcaagaaatggcggcgggagcaaaaggagatggtgcagaaggggttgatcacgatgggagatgtcgagatggcggttgctgaagggacttcacaaaaaccgagtgagaaaactctgatg

SEQ ID NO: 1161 - DNA, 398 bp, Lilium asiatic
  Clone ID: LIB3229-023-P1-K1-D6
cccacgcgtccgaaccagtcgaagcccaagcagggtgccgcctggggcagctccctccgcaaggcctacaccttcgacaccgtcgaggagttctggagcttgtatgaggtacttcgacctagcaagttcccggcaaatgctgatttccactgtttcaaagctgggatagaacccaagtgggaggatcctgaaaatgcaagtgggggaaagtggtctgttaccagtactggaaaggccaatcttgactccatgtggcttgagacgttaatggctttgattggagagcaatttgaagagagtgaggagatctgcggagttgttgcaaatgtccgccagagacaggacaagatcgcactttggacaaagagagcaagcaacgaagctgttcagactagtat

SEQ ID NO: 1162 - DNA, 86 bp, Lilium asiatic
  Clone ID: LIB3229-023-P1-K1-D7
cccacgcgtccggccatgaagccgctttctgttaaaaaagcaaatgatgacatctttattaaattgggttccgacaagggcactgg

SEQ ID NO: 1163 - DNA, 331 bp, Lilium asiatic
  Clone ID: LIB3229-023-P1-K1-D8
gggccatcctcaatcgaagattatatatgaaaccttacacggagtgaataagctgatgaaattggaagggcatcttcgaaacagtctactgctcggtgagatggaggttcggtgagtgaagggatctttcaacagtactgggctcatcgtgtcctctaagctgccgagattctctggcacctacactcttgttgtagctagtgttgatccaaagtcaatttctgcaaagaaaactgttcaacttacccagagtgtgaccaaatggtaagttctaactttacattacttttctggtcaagccttagtttacctcgtaaaactgtcatggatt

SEQ ID NO: 1164 - DNA, 199 bp, Lilium asiatic
  Clone ID: LIB3229-023-P1-K1-E11
cccacgcgtccgaatattatggatgcagttgaagcccctgcatccacgaaaacatgcatttttttcgaggtgaacacttctgtttttggttttgttttccttgtttggcagtatttgcttagattgtgggggaagggcaagtgccctctttactttacctagctcttttttgtcgaataaaaatgagacttgatattta

SEQ ID NO: 1165 - DNA, 394 bp, Lilium asiatic
  Clone ID: LIB3229-023-P1-K1-E12
gctgctcgagatgaagctgcttcttttcccagcactcctgctgatcatctccaccctcaccgttgacggtggggtcgtccatgatacctccgggaacgcactcaaacctggcagtacctactacatcaaatctgtcttcagaggggccgcaggcggtagcctgtatcccaattggtgccaattaatttgtcccccaatctatcctgatatctgccagcttaatgtcgcccagactaacagtgacctcgacgacggtgtacccgtcatcttcactccggcgaatactgacgacaatgttgtccagtacttgagtgatgtaagcattaagttccatgcccccaccatctgtactctatcgacagtctggcagctggccaagaccgaccacaatact

SEQ ID NO: 1166 - DNA, 405 bp, Lilium asiatic
  Clone ID: LIB3229-023-P1-K1-E2
gcgaggcgctcctccgccggatgaacaggtacgggctccttgaggaggggcagaacaagctcgattatgtactcgccctcaccgtcgagaactttctcgagcgtcgcctccagacccaggtcttcaagtccggcatggcgaagtccattcatcatgctcgggttctcatccgtcaacgccatatcagggtggggcgtcaggtggtaaatatcccttcattcatggtgagggttgactctgcgaagcacattgactttgctctcaacagtcctcttggaggtggtggtcctggaagggtgaagaggaagaacctgaagtctgccaccaagaaggccactgatggtgatgaggaagatgaggaatgagcaccgatgctggcaaggaataaatctttttacttgcttt

SEQ ID NO: 1167 - DNA, 391 bp, Lilium asiatic
  Clone ID: LIB3229-023-P1-K1-E4
cagaaggtgagcttcatggacgaggccgctgctgtcgcagctgcatcgaaggcgatacaggagacaaaggagagccttggtgcgagtctgaaggaaatcagtgtcgcggtgaaggaagcggtggagaaggtgaagaaagggtcgagattggtgatgggcaagtttcaggctcctgctgagggaaactacaatctgagctcctactgcttgtgtgatgcgtggataggttgtgacaagaagagcggttttaagctgaaggttctgaaaaggagccgtgcgggcacgaggggatatattgcggaagaagggccgttggctgaggaaggcggtgaagaggaggaagaagaagaggaagaggaatatgactattatgagagcgagttcagcgatg

SEQ ID NO: 1168 - DNA, 80 bp, Lilium asiatic
  Clone ID: LIB3229-023-P1-K1-E6
aaaaaaaaaaaaaaaaaaaaaaaaaaaaaaaaaaaaaaaaaaaaaaaggaaaaaaaaaaaaaaaaaaaaaaaaaaaaaaa

SEQ ID NO: 1169 - DNA, 388 bp, Lilium asiatic
  Clone ID: LIB3229-023-P1-K1-E7
gttggaaggacttctggggaatctccaacagttcaccgatcctaagctggagctggagcagtaccccacgggatctcatatcgcctccagaattctatacacggctgaaaatacatttggcgatataggtggcaagatagttgcagattttggttgtggctgtgggacgctaggtgcagcagcagctcttttggatgcagagcatgtcattggcattgacattgacccccaatctcttgaaatagcttctcaaaacgctgcagatctggagcagttggacatagatctcatttggtgcgacattaagaagttaggatggagaggtcaacaggtagacactgttgtgatgaatcctccttttggtactcgactgaaaggatctgatatg

SEQ ID NO: 1170 - DNA, 402 bp, Lilium asiatic
  Clone ID: LIB3229-023-P1-K1-E8
ttacttcccaccttgcaacaactccagaaccaccttaacagtccaacatcggcggaagcttcatgaaggtacatctatgtactttattgtactatttatgactcatacggactgatatgtgtaggaatcaggcaaagattggatttgtgctgcaacatgaggaaaggatcaaagctcacaaaggaaaagagattttgcgagcatgatgaggatgtgcttttatatctataagtaccgcttcacccccatatgattggagtctgaggttttactcctgcccgagtggggaggggcacattgtggggcgcgtttgtactcggcctggcggaagcacattgtgagagcatttacaagcgatctgctagtggagagttaatgatagtaaccagatgatagtctttg

SEQ ID NO: 1171 - DNA, 333 bp, Lilium asiatic
  Clone ID: LIB3229-023-P1-K1-E9
cccacgcgtccgggtggtggttgatatcaaggagcccgagcctgcccctgctgtgaacccgatggacaactcagggtatggctactaagtgaatacggaaataagtccaagggagctttatgttgaggaccatccttggtagaggagggtcaacctttttgtataatctaatctagatgtatttgacattgtttagtgaattaggtttggatctagattccgggagattctgatattttcaattcatttccatggttctgactgtgctctgttgtgtaatatgtttgcagaactttttgagattgttattcaagttcttagtattggggtgat

SEQ ID NO: 1172 - DNA, 403 bp, Lilium asiatic
  Clone ID: LIB3229-023-P1-K1-F1
atcggattgcaagagtggcatttgaggttgctcgaacaagacgtggtaaactttgctcagttgacaaagcaaatgtgttagaggcatctatgctatggcggagaagagtgacaatgatggcttcggaataccctgatgttgaactttcacacatgtatgttgacaatgccgcaatgcagcttattcgtgatcccaaacagtttgatacgatcgtcacaaataacatctttggcgacatattgtctgatgaagcgtccatgcttactggaagcattggaatgcttccatctgccagcaccgctggatcgggacctggactttttgaaccaattcatggttctgcgcctgatatcgctgggcaggataaggctaatccgttggcaacagtgctaagtgccgcaat

SEQ ID NO: 1173 - DNA, 81 bp, Lilium asiatic
  Clone ID: LIB3229-023-P1-K1-F10
tctagccgaggatatacatgatacatttttaggtactcgtgcatgctaggtgatagctatcctatggcggtgggtaaattc

SEQ ID NO: 1174 - DNA, 398 bp, Lilium asiatic
  Clone ID: LIB3229-023-P1-K1-F12
ggtgaccttactgggatcaagaagcatttcagcaggaagcacggagagaagaagtggaagtgcgataagtgctccaagaagtatgctgttcaatctgactggaaggctcactctaagatctgtggcacaagggagtatagatgcgattgtggaaccctattctcaaggtaccaattcttaaacataattaggtcattgataaatattgggatataacaagagagtttaaagaatcggtgatagccaactttctgtagttagttagcttggaacttaagcttttcttcgcggagaggttcatccttgaaggacaatgttgcatcatttcctaatttgaagttcgttcttgttcttacctgattttacttctagaaaaaaaatatgattgaccatgaagt

SEQ ID NO: 1175 - DNA, 330 bp, Lilium asiatic
  Clone ID: LIB3229-023-P1-K1-F2
acatctttgggcggcgagcggttattttttttacaatgacaaagcgcactaaaagggccggggtcgttggcaaaaattgtactcaatatagtgctaggtcgaggaaacaaataaagaaaatggaagggtctcagcatgcaaaggatatccgcaagttctgggggaagtattactggtaaaagaaaagaacaatgcaatctggggatgcaaggacagaagcaaggctaacgcagggggagctcaaacctttaacactgcaagcgccgtcaatgagacgagcaccattcgacgtttgagggagcggaccgaatggtatatcctacaaaacgg

SEQ ID NO: 1176 - DNA, 394 bp, Lilium asiatic
  Clone ID: LIB3229-023-P1-K1-F3
acatctctgtgcggcgatctctcgttaccctcgcaatgacaaagcgcactaagaaggccggcattgttggcaaatatggtactcgatatggtgctagtttgaggaagcaaattaagaaaatggaagtttctcagcatgcaaagtatttctgtgagttctgtgggaagtattctgttaaaagaaaggcagttgggatctggggatgcaaggactgtggcaaggttaaggctgggggtgcttataccttgaacactgcaagcgctgtcactgtgaggagcaccattcgacgtttgagggagcagaccgaaagttaaatcttacaaatcggtggtgtcttggttaagtcatttggtctgggatgattttgaatctagttgctaagaacttttctgtc

SEQ ID NO: 1177 - DNA, 410 bp, Lilium asiatic
  Clone ID: LIB3229-023-P1-K1-F5
cacgcgtccgcccacgcgtccgaaacttttttcgtgatcttgttggtggttgccatctccggccttctgattgacaacccggcgctgggggcgacatgcaaccccagggagctgagtccctgctcgggtgcgatgctgtacggggctgcaccagcagctaactgctgcagtaagctgaaggagcagcagccctgtttctgcggttacatcaaggatcgaagcctgagcgggtacgtgaactcggccaacagtaggaaagtggctgctgcatgtggactcaagaacccacattgctgatctgcatgcagttccaccctgcatggcatatgcagaacgtcgacaacccttgcgcaatatgctagtacgaaataatagccgttggtgcttccttttatgtatttttatctctt

SEQ ID NO: 1178 - DNA, 301 bp, Lilium asiatic
  Clone ID: LIB3229-023-P1-K1-F6
caatattgttcggaataatgcagactttgtttctgtacaaggtcgcaccagtgttcattgagggtgtcatgtcgttcctcaagatctatactgttatgttgctctgtcagcccatattttactgctatgcaccagggtggattcataccattgcctatccctattctaaaggctccataccataaacataagcacgccatggattacatttgcagtatatcaagagagtcaatagaatcggtgcttgccaaccttctgtagttagatagcttggaactcaagctttttttaggagccaggc

SEQ ID NO: 1179 - DNA, 389 bp, Lilium asiatic
  Clone ID: LIB3229-023-P1-K1-G1
ggagaagctgagaagaacttgggcacgactgggggtgtgaacctatatgctcaaatggtggatgatgtcgaggggtcagataaaattgaaagtcttcagaatcacgacaatacagagatatatgagaaggctgtaaagattcttgaaacatattggatagaggaggaagatgagaacatggcggctgatgttggtgaagctgtttatcagtttggagagggagaagtcccagttccttccggaggattccactttggctgaaggggtgttctgccatgggggagctgttaggtgatatgctcccagcttgtgatggtgatgtgttggggtcagtcggggagtcggcaatgccagtccaggtcctgtcagtccagtctcgagtgttggtc

SEQ ID NO: 1180 - DNA, 378 bp, Lilium asiatic
  Clone ID: LIB3229-023-P1-K1-G10
cttctttcaatcctccaaggcccccaccaccagggtctgcaccacctatgggtaccatacagccccctcctcccccgcctatgacaaatggctacatgcggccagtttctacctccatgccacagccaatggggagcttcactcctggtgttgacatgggtcggccaccgatgcaaggttttcctggacagcagatgcaagcacaagggccgcccccaccacaggcaaacatgggtcgctaacttgcaatgtcatcccgcatattttctgtcttcaatcaaacctaagtttgttcttctgtaccgttaattaacggagatgggtgacatgctgttttgtatgttcggatagctatgaatgtgcttttcggtgtttatg

SEQ ID NO: 1181 - DNA, 399 bp, Lilium asiatic
  Clone ID: LIB3229-023-P1-K1-G11
cggacgcgtgggggacactagttcttgcaaaccagtagaatcaagcaacaactttccaattgtcccttgtggattgattgcatggagcttgtttaatgatacatacactttcacccgcaaaaccatgaaattggatgtcaataggaagaatatttcctggaagagtgaccgtgaacataagtttgggaagcacgtctatcccatcaatttccagaacgtatccttaattggtggagggaaacttgactcacacattcctctgagtgagcaggaggatctcattgtatggatgcgtactgccgctcttcccaagttccgcaagctatatggtgtaattgaacatgacctagaacccggagacctcataactgtacatcttgcaaataactacaacactta

SEQ ID NO: 1182 - DNA, 391 bp, Lilium asiatic
  Clone ID: LIB3229-023-P1-K1-G2
acattagttggggggaacctgttctcgacttttctttttcacatagccctacaagggggggcgtagctgtcatattttgttctcaacccatttctctgaaaacttaccatttcaagaatatgtcagtttgttcaaacaggagcactttggtccgcgcatttgggagggagtgttgaattcaatctaagccaagccaaaagtgataaaatgattccattccttagccgcttaaatggccttgtaaccatgttagattctcgctcataccaacaagacctatccctttattttccagtatgccttaatggatcttgaatatgtatttaagattaatataattaaattaattgaatctaagtcttcaatataagcagacatgacctttgaactg

SEQ ID NO: 1183 - DNA, 326 bp, Lilium asiatic
  Clone ID: LIB3229-023-P1-K1-G3
gtagtcgggagcatgatttattgaatacgattatggcttgacattcatgggagggtgtagttgtgatcatctattttcataccacgattatgttaacatactggcaaaatctcggcgcctgttttggcaattaaaagagtatgctcaaattgtgcaagagggctaccgttcaccgtaagagcagtccaaccgtcgtcccacattagacaatctatgctccccattgtgaaaattggttctatggtaaatgtttgaccttcgatcatacttccggatctatcattccggtgatgaaggatgattggttctgaatggtatattggacc

SEQ ID NO: 1184 - DNA, 381 bp, Lilium asiatic
  Clone ID: LIB3229-023-P1-K1-G4
gaagcaagatttagtgaaaaagaatttggtatggcctacatgtaaaactgtagttgggatgatatatttgtataccaggatgatgtcagcatactgtgaaaatcttggcgcccggtttggtaattaaaagagtatgctcaaattgggccgcagggctaccgcccaccgttagagcagttcaaaccgggggccacattatacaatctatgctccccattgtcaaaaacgggtctatgggaaatgtttgacccttgatcatactcccggatctatcatttcggggagggagtatgattgggtctgaatggaatattggacccacaccatgggcgacgaaacgatgcaccacaccatacccatactttttgggatgctcactta

SEQ ID NO: 1185 - DNA, 396 bp, Lilium asiatic
  Clone ID: LIB3229-023-P1-K1-G5
ccatggtgtgcaccaagtatgcattcacccctcagcaggtgactagtgcccttgcggcagccatagcctccgacaaggctgctgcaacacaggcagagctcttcaagaaggccaatgagggagactgagcaatgtttggttttgttctgcttgtgtttggcagtcctaggtctcgagtaccaatgggttgtgaagcactaggacaaaatgaggtgacataacggaatcgtaatatggggtgggtatcttgacgcacacatgcctgcgagtactacaagaggatactcattgagtggaggctgactgccactcataccaaggtccggtagctatatagagtaaatgggcgtgagctataaaccatacaccttatcactgtccatcatgcaaaaaata

SEQ ID NO: 1186 - DNA, 98 bp, Lilium asiatic
  Clone ID: LIB3229-023-P1-K1-G6
ccatggtgtgaaccaaggatgcattcactcccttatccgctgccagatcccccagcgggagtccaattgtcccttgtggattgattgcatggagcttg

SEQ ID NO: 1187 - DNA, 336 bp, Lilium asiatic
  Clone ID: LIB3229-023-P1-K1-G7
attggttgtagcaacacgcggaaacgccagaacaagaacaaaagagggcgttcaaagagagcacgagctgatggcccgtcatccatgttcccagagacagcaaaccaaggatcacctgtttgtacagagactgcagcaaaggagcttcgtgaactgacagctgtggcggtttgatgaccagtttttatataaaggctaactggtcgaattgtaggcgtttggtaaatcactctgtaggccttataatgtgtacttggattgtattgctacggtcagtgagatggtactttgaactttagttcttgaaaatgtggtttgctttgttcttctctaaaa

SEQ ID NO: 1188 - DNA, 383 bp, Lilium asiatic
  Clone ID: LIB3229-023-P1-K1-G8
cccacgcgtccggaatcatgtatagatcttcaacaatgatcctgtaaaaacacacaaaagtttctaattccatgttactaaccgctatactcgaaaagctagttgttgggaagagggaatattgatgtcaaacaggagcacttggtccgccattgcgatggatgtagaattcaatctaagccaagccaaaagtgataaaatgattccattccttagccgcttaaatggccttgtaaccatgttagtttctcgctcataccaacaagacctatccctttattttccagtatgccttaatggatcttgaatatgtatttaagattaatataattaaattaattgaatctaagtcttcaatataagcagacatgacctttgaactg

SEQ ID NO: 1189 - DNA, 369 bp, Lilium asiatic
  Clone ID: LIB3229-023-P1-K1-H1
cccacgcgtccgcggacgcgtgggctgcctctcagggtctgtatgttgcgtagatacaaaacgagcctgtctttattgctgtgttgtgttggcttgatgctatcacacttgccaagtatgtccaagcatcaaggaaatgattagccaggactatagacaatgtttgggttcgaaagctaaatttggtccattagcgcatttcctcacttatattgatgggttacaaaagtgaacttctggcttcatgatatccgcaaatatccatcaatatgactcatgggcattgacatcgtttggaatgatggtgccattccaaataactgtttgatcacatggacccctcaatatattattgcaattgttagtttt

SEQ ID NO: 1190 - DNA, 402 bp, Lilium asiatic
  Clone ID: LIB3229-023-P1-K1-H10
gacgaatccaaaacctccgccctccacaggagtaccgattcaaatattattaaatccgacccaacccaggttctctttcataaaattcattctaaaaccttcgttgtcccctaaaccctagtccccaaattctccaccaccatggcgaaatccagctcgctggtctcccacatcgaagcgttcgtcgattcctcccgctcacccgcccatcagactgcaagcgtcagcgcaatcacatcgcttgtgaagaacaaagtcttaacacttgaggccttggtactcttcttctagctgagattcttacctttcttgtcttagaaccattagatagttcagcaatcaggtgcttggtagggttctttacatcaaagctggcagattggctagccatacatggtgcac

SEQ ID NO: 1191 - DNA, 406 bp, Lilium asiatic
  Clone ID: LIB3229-023-P1-K1-H12
ggccatcacgaggatttaggaagaaggcatgatccattaagaagttctggtggggaatacactggcagttggcaaggtaagtttggttcaggtaaccagtcacacttgaatgattttattagtagggatcctcatgggtttgatgaacgatcaaaagctctttcactcggtaggccatatggccctggctccattagaaaggacattgacggtactgaagtgctacccagtcgcttgggccatgttgagccaaatggttttggtagtattcataatctgcgaatgggcgacccagcgggtcctgggaatttgtcaacgagcagacatggttatcccggtgaaactaaaacattcaactcttttcctattcctggtggcatggattccattgagtattcaagaatga

SEQ ID NO: 1192 - DNA, 159 bp, Lilium asiatic
  Clone ID: LIB3229-023-P1-K1-H2
gcatttggagaggggaggaggttactaactgtgataccatgcctcgtcctacatgttagggcgtagttgggctaatgtatgacccaacttctgctatttgagcataccacctcaagctggggaccgggtctagagactcatactgcactcccataaact

SEQ ID NO: 1193 - DNA, 392 bp, Lilium asiatic
  Clone ID: LIB3229-023-P1-K1-H3
gcattaggttgggggcacggatttttattggtgcgtgcttacctacccgttcgtggagggtcgtagctgtgttatggtgtcacctaaccacaattcactatgccggtgttgaacaacgatctgcactgttaaaaccttgccgaggcaccaccttaaattgctcgaatgacattcatctaagcgcaggggcgctggtatagtacagagaccggaccgatcatgccttgccgacgagagggcaggctctatggtgaatgcgactctccctgtacaaggccattaagctcagctgttgtagtggtttctcacatggtggccgttacacttggcagctggctatctgccgatccttttgatttattgcctggctttcatgcgccgttcgccggctt

SEQ ID NO: 1194 - DNA, 403 bp, Lilium asiatic
  Clone ID: LIB3229-023-P1-K1-H4
gcactcccacaagagaagaaatcaaatgcatgaatccaaattacacagagttcaagtttccgcagattaaagctcatccctggcacaagatcttccataagagaatgccacctgaggctgtggatctggtctctagacttctccagtactcccctaatctgcgtagtactgctttggaggcattgattcatccattctttgacgagctccgtgacccgaatgcccgtctaccgaatggacggttccttcccccactgtttaacttcaagcctcacgagttgaagggagtacaaatggagatcatatttaagttgattccagaacatgcgaggaagcaatgtgccttcctaggactgtgagtgagtcccagctgggatgtttgtacctatgaacagcttatgtg

SEQ ID NO: 1195 - DNA, 255 bp, Lilium asiatic
  Clone ID: LIB3229-023-P1-K1-H5
gcggggtgtaagaggagggtggggctgacggggatccgttgccggtgcggcgagctgtattgcgcggtgcaccggtacacggatcggcatgactgcagctatgattataaggccgccggcagggaggcgattgcgagggagaatccggctgttcgggcggctaagatcgttaggatctaggttgttggtggtggttgggtgagggagctgggatcgttgtgcgctgatgtagtaagctagtgttttttataaaaa

SEQ ID NO: 1196 - DNA, 406 bp, Lilium asiatic; identical to SEQ ID NO: 1191
  Clone ID: LIB3229-023-P1-K1-H6

SEQ ID NO: 1197 - DNA, 374 bp, Lilium asiatic
  Clone ID: LIB3229-023-P1-K1-H7
cccacgcgtccgtgcaaggaactaggcattacagcactgcatattaagcttagggccactggaggcaataagacaaagacacctggtcctggtgctcaatctgcccttcgagcccttgctcggtctggaatgaagatcggccgaatagaggacgtgacccctattccaactgacagcactcggagaaagggtggacgacgaggaaggaggctataagtttctctatctgctgcaaatctcaatatggtgtatctggagtgcaaaaggttccaagtcagttccagtagagttttaaagctctgttttctttttgctttgtttcatgttatgagctagtactgtgttactgcaagagaattttgtttttcctgttt

SEQ ID NO: 1198 - DNA, 382 bp, Lilium asiatic
  Clone ID: LIB3229-023-P1-K1-H8
gaagattttacgaaaagagatgatgagaactggataagacatactctagggtattgggagaatgagaaggttaggctggcatacaggcctgtccatatgaatacacttgatgaagaagtggagacattcccaccgaaagcacgtgtttattaagtgacgacggtttacctggactggtttagatatttgtagtcactcagtctgcagctgcatttgagttcaataaaatatcatcatcccagtatcctgcttatgaagtgtgacagattgaaacagtgatattcttgagagccttcttgttttaaataagtgcaggctgtatttgtaaccaagattgtactttaaacctttataaatgcagccaaatattatgtgttttgct

SEQ ID NO: 1199 - DNA, 414 bp, Lilium asiatic
  Clone ID: LIB3229-024-P1-K1-A1
caccattatcgatcgaagtattcaagatggttacataaacgctatccgcagagcaaagaatttcatctacattgaaaaccaatactttcttggtagctcatttgcgtggaaaccagaaggcatcaaacctgaggatattggagcattgcatctgatccccaaagagctctccttaaagattgctagtaaaattgaagctggggagaggcttactgtttatattgttcttcctatgtggccggagggtatgccagaaagtggatcagttcaggcaattttagattggcaacgaagaaccatggaaatgatgtatactgatatcattcaggctcttcaagccaagggaattgtagcgaattccaaggactatttgaccttttctgcttgggaaatcgggaagtgaagcagaacgga

SEQ ID NO: 1200 - DNA, 423 bp, Lilium asiatic
  Clone ID: LIB3229-024-P1-K1-A10
ggcaaaaccttcatctccggagatgagattaccaaggatgatgtgaaggtttatgcggcagtgtcttcgcccggtgaggggttctctaatgtttctcgttggtatgagaccgtctcttcagctcttgcagtgaggtttcctggcaaggctgctggagtgaatattggtggacaagttccactgtcggaacctgcaccttcgtctgaggctacaaaggtggtggccgaagaagatgatgatgatttggatctctttggtgatgagactgaggaggagaagaaggcagctgaggagagggaggctgctgtcaaagcatcctctaaaaagaaagagagtggcaagtcctctgtcctattggaggtgaagccatgggatgatgagactgacatgaagaagttggaagcagcagtccgcagcattgaa

SEQ ID NO: 1201 - DNA, 148 bp, Lilium asiatic
  Clone ID: LIB3229-024-P1-K1-A11
ggcaaaaccttcatctccggagatgagactaccaaagatgatgtgaagggttatggggcagtgtcgacggccgtagaggaaatctctaatgactcgcggaggaatgagaccgacacttaagctcaaagcagagaggataactggcaaa

SEQ ID NO: 1202 - DNA, 104 bp, Lilium asiatic
  Clone ID: LIB3229-024-P1-K1-A12
ctcgaatatcccatcaatcatgacatgcctctgcaaggaagggatggcgctcgacaagggcggggcctatggccaattgacggtgccctgtgacatcttcttta

SEQ ID NO: 1203 - DNA, 409 bp, Lilium asiatic
  Clone ID: LIB3229-024-P1-K1-A2
ctgattaagacaagaactacacaaacttggcccaactgcccgctgctgagaatgccaagtctttcgaagaaatcgaacttgagaaggacttgcgcaagaaatgggctcgacgggatgatgagtacgactcgatgcttggagttgtccgtgaactcccgcaacagcttgtccttccggacaacattctgccagacaaaaccccgaagctctctcactgaattgggttctagatggcctcagggttgtttaaggatgcttaaagaggttggtgacctttgctttttttcttttaccctccaataatttttgggttgagctatgttttcacctggtactgccgggttcttgtgttcttgttcaatttgtatttgaaatccagtactgcttctgagacattggttagggttat

SEQ ID NO: 1204 - DNA, 240 bp, Lilium asiatic
  Clone ID: LIB3229-024-P1-K1-A4
acgcaaaaccaaagatagtggcatcgcatacctaaaacaaacataccagaacggattaacaatcagagggttactgaagacattccccttaccaaaatggaaacgatggtcggagagttcaatcaccacttgtaaaaaaaactaaagggtcgcttgggaaagccaaagaattatcaaactcaaatgcctctctaactggaagcaaagccaatgtaccgatgaattcccaacaattgatag

SEQ ID NO: 1205 - DNA, 157 bp, Lilium asiatic
  Clone ID: LIB3229-024-P1-K1-A5
caaaaccaaagattgtggctcgcatacctaaaacaaacagaccagaacggattaacaatcagaatatatggaagacatttgcttcccaaaatggaaatgatgggcggagagttcagcaaccacttggaaaagaatctaagggttctctggggaaatc

SEQ ID NO: 1206 - DNA, 397 bp, Lilium asiatic
  Clone ID: LIB3229-024-P1-K1-A6
cccacgcgtccgcccacgcgtccgcccacgcgtccggggttccggggctaagtggggttggtggagagaggaacacttcaatgcttcggatgttgatggagatgggctgttgaataaaacggagttcaacgacttcttacatcctgcggatagtgttaatccgaagctgattcactggctgtgtcaagaagaaataagggaaagggacaaagataaagatgggaagctgagctttcaagaatacttccatggattatttgattcaataagaaattatgatgatgaccacaatcagtctgatagtgatgcacccgcaaaaaagttatttgcacagcttgatctgaacaatgatggatttttgacggtagaagaaatacaacctgtaattggcaatctt

SEQ ID NO: 1207 - DNA, 428 bp, Lilium asiatic
  Clone ID: LIB3229-024-P1-K1-A7
ctgataaagacaagaaaaagacgaagtagaagaagaaatccggcaaccaaccgaatcccgccgtagaggaggatgacgatgaagacgatgtccccctcgccttctctagggggaacagcaagaagaaatccggcaaccagccgaaggtgaagaacgagttcttggacggagaagaggacgaaaagacccccaagggaaagacacagaagaaggaaggcgcgagcctttccaaagtgaagaaagagcattctctgtctgtcaaggggaaggaaatgaagaaagtggcggtgaatagcgatggaaaggcgtcgaaagtgaagagggaagaaatcgaagtttgggatgaggaagaagggtctgacaagggaaagacaccgaagaaggtgagtacaaagagtaaactgaagaaagaaggcctgtattccgat

SEQ ID NO: 1208 - DNA, 64 bp, Lilium asiatic
  Clone ID: LIB3229-024-P1-K1-B10
gctggaagtgcggcagttctagacgagccagacgtacctacccttgggggggaggtgacacatg

SEQ ID NO: 1209 - DNA, 426 bp, Lilium asiatic
  Clone ID: LIB3229-024-P1-K1-B12
cgccgctgctgctgccgccgccgccggtgggtctcaccctcttcgtctccggcaaagatggatcgtgaaaggctcatgaaaatggctggtgcagttcgcactggtgggaagggaagcgtgcgcaggaagaagaaggcagtccacaagaacactactacagatgacaaaaggcttcagagcacccttaaaaggataggggtaaatgctattcctgcaattgaagaagtgaacattttcaaagatgatgttgtcatccaatttttgaatcccaaagtgcaagcttctattgctgccaatacttgggtggtcagcggctccccccagacaaagagactccaggatatactgccttcaataatcaaccaactcggtcctgataacttggacaaccttcggaggcttgctgagcagttccagaagcaggtt

SEQ ID NO: 1210 - DNA, 414 bp, Lilium asiatic
  Clone ID: LIB3229-024-P1-K1-B4
gccggatggtttcgtatcagcgggatacttgcacttcatgcaacataagagaaaatgagacgaagcagtaggcaggcagagcagatgttgacaaaacaggagatggtggtacgggagtggacgtggaagacacgtgaggagagactgtaggtacaaagacaaatggagtgaatccccgagatgagaaagagtgatattatgaaagagaggagagctagtaggaccaagaacgaaaggacgaccacctagtaggtacaaaaacagatggttcgaaatatgtgtataagaatcatctgacatgaagctaaagggttccatctggcgacaaacgcccaaggaacaacatgacaagatccaacaggacaactaccgaccgagtaggaactggctggtggtttggtatcagctggatac

SEQ ID NO: 1211 - DNA, 336 bp, Lilium asiatic
  Clone ID: LIB3229-024-P1-K1-B5
aagaatttcgctgaagagctggctgtgattgagctcaaaatcaaagagaggaatgaagatgggagattgaagaacaggaatgggccggtgaagatgccatacacgctgctgtcaccgatcagcactgaggggctcaccatgaaggggatccctaacagcatctccatctgagaattagatccgaaaccaagatgtggtaatatttagttcctttgtatgcctgctggctaaataatagcctcttttgagatcgatctggatcattatctaaataatagtctcatttgagatggatttgcagcactaattgatgattctacaagctagaatttcaaa

SEQ ID NO: 1212 - DNA, 405 bp, Lilium asiatic
  Clone ID: LIB3229-024-P1-K1-B7
tggcgatgatggggggaagttgaaggatggggatggggaggatgatgaggattggctggcgccgccgccgccgaagatcccgaatactgtatctaggttactagaagacaagacattgcaggagttgagattaaagaaggaagaattggcattagttgctcaatccgctgagaaattgttgaaagaagtatctaccaagaaggagtttaatgtttcagcaaggtctttaatggatgctgaagttgacaaaccacaaaaacaagttgaaagacgaaaagttgttatatgtattcaggacaaggatggccaaaggcagttccccttgtacagggaatgacaacttttagaggctcttcaagatgtacgcagataaggttaaagtttcattggacagactagtttttc

SEQ ID NO: 1213 - DNA, 299 bp, Lilium asiatic
  Clone ID: LIB3229-024-P1-K1-B9
gctggaagtgcgggaattttgttccggctggaggcgccggacgtgaaggaagcggtggcgcatgcggtggaggctggtgctgtgctcgatggtgagatcgctgaggatgatgggccatgcaatggcggcttggttgggaaggtgaaggatccgtttggttttgtctgggttatagcttctgctgggaagggtggttgtcaggctgaggtcaaggcctgatgttgtttcttttttgtggatcaggccgtctatatgtgtagggtttagtcgtgcattttgttctgcttgctggtttaaaa

SEQ ID NO: 1214 - DNA, 384 bp, Lilium asiatic
  Clone ID: LIB3229-024-P1-K1-C12
ctgggggtagggccggaacccccttttctaaggacgggtgctgagcagatttcctggtaagtttcttaattatgttgggggatctactcgcaggtgagctgtgatgatccaagttgagagtggtatatgtgtgtcagttcataagttgttaactgatatctatggaaggtcggatctcagtaggttgtcccagatccctttaggttaggcgcactcatctacagttaggctaacctgcaagcccggcacatgggtacccccttcaaggtcccactaaatatgggtccgggttctcttagtcgaccgacaaaagggtggtccacaaacccacacgttttcacaggcatccaccgtggggcttcatcgcttatacacggtgaggcc

SEQ ID NO: 1215 - DNA, 159 bp, Lilium asiatic
  Clone ID: LIB3229-024-P1-K1-C2
ggcactcttagaggttccaagctaacgttcacgtgcatgcaacaatatagatagggggttggggctcctgatttcaattcactgaccgatttatcacaccgttgttacagttaaaactctagcgtatccatacttaacggtctagctgcacaatcacat

SEQ ID NO: 1216 - DNA, 324 bp, Lilium asiatic
  Clone ID: LIB3229-024-P1-K1-C3
ccacgcgtccgcggacgcgtgggtcctgctactcgtgcggtgagtctggccacttcgctagggagtgcccgtccaacagggggtgaatacctaacctgctctatttttatgttgtctttagggtttgcgctatgtttttgacccgtctcatatgacagtttgtgttttgggatgttaatggttggatctgtccttcctctggtttatgtggaccttgatttcagtagtttgtggtattttggcggtctttttcttccgagggacgaagagatgtatgctgaacaatgggatctatatgtttggtatatggatcaagtatcagat

SEQ ID NO: 1217 - DNA, 426 bp, Lilium asiatic
  Clone ID: LIB3229-024-P1-K1-C4
gccttctgttcatcttcagcagctccttcggggcttatctcctgctaatttatttggcgcttgtcactccgattgtgcatgatttctacaactatgactttgagactccagcattcatggagctttttattaagttcactcagaatctgtccctctttggtgcattgctctattatcttggaatgaagtactcggttccaaagaggatatcaaagaagaaggctcccaaatcgaaaacagtttgaggcgaggcgaagactgtagaggtcgggttgccatcagtaggcacattagatatcaaactctgcttgtattctcgtcttttttgcgatgggtgtgctattggactacccttattccatatgtggttggtaggtatacattatgttttaatcattcaatacctggtttgagacatcattgtag

SEQ ID NO: 1218 - DNA, 390 bp, Lilium asiatic
  Clone ID: LIB3229-024-P1-K1-C6
cggacgcgtgggagaaggctgtcgtagttgacaaaaatgttcattaagacgtaatcgctaaaaaccctaatgagtggaggcaaagtatattagtacctatatatacttgaagaagatgaaaactgaagaactttagggcctgaagtcatgcccatggaggtttggaaggtacataggagaaaaggctgtcatagttgacaaaaatgttcattaagacgtaatcgctaaaaaccctaatgagtggaggcaaagtatattagtacctatatatacttgaagatgaaaactgaagaactttagggcctgaagtcatgcccatggaggtttggaaggtacataagagaaaattctgtcgtaggtgacaaaaatgttcattaagacctaatcgct

SEQ ID NO: 1219 - DNA, 408 bp, Lilium asiatic
  Clone ID: LIB3229-024-P1-K1-C7
ggtcaattttcagacgaaggtttaccacccgaacatcaactctaacggtagcatctgcctcgacatcctcaaggaacaatggagccctgctctgaccatatcgaaggtgcttctctcgatctgctcccttctgacggaccccaacccagatgaccctctcgtccccgagattgctcacatttacaagaatcagaggtctcgctacgaggagacagcccgagcatggacccagaagtatgccatgggctgatgattcagagatgagtgagagtaacatgtatcctaaatctaaacaaatcgatggtgtgcgtcttgccagattaatctggcctaagtgtgtttcctttctgtacattatcgtttatcaacctcgagaactccattacatgacctatttggattgatatg

SEQ ID NO: 1220 - DNA, 423 bp, Lilium asiatic
  Clone ID: LIB3229-024-P1-K1-C8
actcctcattctgttgtccaactctctgttccaacctctgtaatgaccggcagcagcacagggcgtagtggcaacatctctagttcgagctgagaaatcaagaaatttttctcatattctgttcaagatatattgcagcctaagacattctcgaaccattttgtttcttttgaccctccgtcatattgtctaatcccatcctacattcaaaatcctgccctctttaagttattatccgccagacttatctcatttgaataagctacacccagtatagaaaatggtgtagcataattctcagagggtttcacctccttggctaataaccttaataggaagcccttgataatcttgaaacacaaccagacatctcccttctagtgaatgtgccccaaccaaatattgtcgatcctgctgttgaag

SEQ ID NO: 1221 - DNA, 307 bp, Lilium asiatic
  Clone ID: LIB3229-024-P1-K1-D11
gtcaaatgcggctataaatatagaagatggagatgaagaagggggaccagacagtgaagctccctctcaagctctgcctagcctattaagttcaagttcttccaagtttaaattctaacatattttctttaaatttaagactgttttgatttcaatttaagactgcttaaatttcaattcaagattgcttgttgcttcttacatttcagtaagtttagctatttagtttggaattgtagaagaatgattatcatatatgtgaatgttaggatattttattctagtgttcaatataatttatatttga

SEQ ID NO: 1222 - DNA, 249 bp, Lilium asiatic
  Clone ID: LIB3229-024-P1-K1-D2
cggacgcgtggggttctggtggatgctcttgtatccccatctggtgtaactccaatcagccctgcagcactggagaggatgtgatttacagtcactctaccagtaaactttgtgcatcaactgcttcattcgtgcaggctctatatcttatcatgtatcaattaagttaaagctcaaaattgtgtatgagctagatatcaaaacgctaatgttgagtgatagttatattcatgttgaggcatattggac

SEQ ID NO: 1223 - DNA, 396 bp, Lilium asiatic
  unsure (1)..(396): unsure at all n locations
  Clone ID: LIB3229-024-P1-K1-D3
accaagtatacgagcagatactggaaattgggaggngggaataagtactgtcgacatgcaaaccggcagatctatgccatttcgaaagatctggcgacatacatctcaattaatcaggctatactacacaagtatgccaatgaagatgtgtcactcggggcttggtttattggacttgaagtcgaacatatcgatgagaggaacatgtgttgtggaactccaccagattgtgagtggaaagctcaggcaggaaatgtctgcattgcttcatttgattggagttgtagcggaatatgcaagtcggtagagaaaataaaggatgtgcatgaaaggtgtggcgaaggcgatggagctgtttggagtgcagtgttctaataggggtcatgtatggtcacc

SEQ ID NO: 1224 - DNA, 419 bp, Lilium asiatic
  Clone ID: LIB3229-024-P1-K1-D4
cggacgcgtgggccgcgacctccggcgatcaccggccggagacgaagggcccgaatactctgagacgaagggggcgaatactcaccgccgccgatcccatcgtcttctcgaaatggccgatcaactcactgaggaccagatcgcggagttcaaggaggcgttcagcctcttcgacaaggatggcgacggttgcatcaccactaaggagctgggtactgtgatgagatccctcggccagaatccgaccgaagctgaactgcaggacatgatcaatgaggttgatgctgatcagaatgggacgatcgatttcccggagtttctgaatctgatggcacgcaagatgaaggacactgattctgaggaggaactcaaggaagctttcaaggtttttgacaaggacccagaacggcttcatttct

SEQ ID NO: 1225 - DNA, 422 bp, Lilium asiatic
  Clone ID: LIB3229-024-P1-K1-D5
cggacgcgtgggcggacgcgtgggtgctgaattaggcgagaatgttccttctctacctgaaggaaaacccaaatcactactgatcccccctgcacctctcacagcctgtggtgattggccattgctgagggtaatgcgcggtatttttgaaggtggattggatgctactggaagggcggatcttgaggaagatgatgaagctgctggtgctgattggggtgatgaggagttggatattgttgatgcaagtgaggttgtggccaatggtgatggttttgatgtagaagagggtgaaccaaatgaggagggtggtgaggaaggtggctgggacctggaagatctggaacttccgcctgaaactgagactccaaaagctgttggcaatgctcgttctgctttatttgttgctcctacaccaggta

SEQ ID NO: 1226 - DNA, 147 bp, Lilium asiatic
  Clone ID: LIB3229-024-P1-K1-D6
tcgcacgcgttttcgctcacttatttatatcattatctcgaaaatctttattctctaccctacggaaacccccaatctttactataccccccttcatctctcacatactttgaatatactccactactcattcttcttcacttcttt

SEQ ID NO: 1227 - DNA, 422 bp, Lilium asiatic
  Clone ID: LIB3229-024-P1-K1-D8
cccacgcgtccggttaagctcaggcagttccgaggggctgttgatgcagctcgtaaagcaaatagttcaaaaacttggaaggaggtttgttttgcttgtgtggatgctgaggagttccgcttggctcaaatatgtggactgaatatcattattcaggttgatgacctggaagaggtcagtgattattaccagaacagaggatgctttgatgagttgatctctctgatggagagcggccttggtttggaacgtgcacacatgggcatttttaccgagttgggagtcctgtatgcgagatatcgtacagagaaacttatggagcacattaaacttttctctacccgtcttaacattcctaaactaatacgagtgtgtgatgagcaacaacactggaaggagctcacatatctgtatatacagta

SEQ ID NO: 1228 - DNA, 270 bp, Lilium asiatic
  Clone ID: LIB3229-024-P1-K1-D9
cccacgcgtccggttaagctcatgcagttccgaggggctgttgatgcgagtcgtggagcaaatagttcaaaaacttggaaggaggtttgttttgcttgtgtggatgctgaggagttccgcttggctcaaatatgtggactgaatatcattattcaggttgatgacctggaagaggtcagtgattattaccagaacagaggatgctttgatgagttgatctctctgatggagagcggcctaggtttggaacgtgcacacatggtcattttt

SEQ ID NO: 1229 - DNA, 408 bp, Lilium asiatic
  Clone ID: LIB3229-024-P1-K1-E1
cggacgcgtgggcggacgcgtgggcgccacttgaagaaccgacgattatcgagtcatagagtggctgagccggtatctcagaaattagctaatcatgaaggttgggacacttcccactatcattgcaatgtggtctcgtctcatagagcatttcgaacaacgctctggagctcgagctgcgcacctctaccatcaggcatggaccatcaaacgcaacgacggttgctgcccctcttagattgtagcgaggttgtcgaatgttatatactgctcttctaagtgtgggctattacttcgagtttgtatgatatgtgagtcaatgtcagtgaagattgtatatatatgagaagtcatactcaagtatctatagttaacagttttcggataagatatcttggaagtgcaggt

SEQ ID NO: 1230 - DNA, 422 bp, Lilium asiatic
  Clone ID: LIB3229-024-P1-K1-E11
ggagaattcttctttagagatcgagtcaagtttgatgatgaatctctaaaattttgagccaaatctggatagggcagtgatggttaaagtggacatactaccaggaaagtacatgattttatcaattagtgagttatttctcaataaaaattatagtgagactttaaagcgatagtccctggatattaggtatgatgctgaaagagaggatgacatcatggacaactataaggagtcgtctgaaaagagggcattatcaatgcttttagttaatctctttgatacgtttacctttcttatgtatctggggccaatgatgtatgttacttctcttccaacaatatttagtgtgacaactagtgatataaggtgagagtaaggaagcattctagatgtggtgactcattttatgagagaccttt

SEQ ID NO: 1231 - DNA, 93 bp, Lilium asiatic
  Clone ID: LIB3229-024-P1-K1-E12
agaacgacagcggtcaatataaacgttccaagcctacctgcgcctgcatgcaacggcgtagactacatgtagctgcacacaactatattcaac

SEQ ID NO: 1232 - DNA, 314 bp, Lilium asiatic
  unsure (1)..(314): unsure at all n locations
  Clone ID: LIB3229-024-P1-K1-E2
caatgttaactatatttgtctatagttatctcgcataggaggattcaagaaaccatctcggtgactgggctgctagatcaatgtctgccatttgtaattttccatcagatgtgctcactgcctatcaatagattagagtggaagtgtatttactgtncaaaaaaataaaactaaagaaaaaaacaaaaaaaaataaagaaaagaacataaaaaggaccgacggccgatgacccaaataaatattgtacccatgtttgcagaatgttatatactgctcttttaagccagggctatatctacgggcggggatgata

SEQ ID NO: 1233 - DNA, 346 bp, Lilium asiatic
  Clone ID: LIB3229-024-P1-K1-E3
ccggagcctgagatcgaggacgggattgaggaagaggacgcagaaaacaatgaagatgttgctgatgtgcctgtaggcgagggcgaagacaaggaggagacaccaatagaacgacctcgtaaaacatctaaatacatgactaagtatgagagggcaagaattttgggtacccgtgctctacaaataagcatgaatgcacctgtgatggttgaactggagggagagtctgatccgttggagattgcgatgaaggagcttcggcaacgcaagataccttttacaattcgtcggtatcttcctgatgggagttatgaggattggggtgtggatgaactgatagtggagg

SEQ ID NO: 1234 - DNA, 303 bp, Lilium asiatic
  Clone ID: LIB3229-024-P1-K1-E5
ccttcctttgcacccttgcgtttgtgatgcgagagattctttaataattacccaaattcttaccccgttccgtcccccgccgaagaagaagaaaaaaaatgaagaattcgccttccctccttaagttggggaagaaaaccgactgttccaccggattcgtcctggaatctttgatgccggccggaatgtggcggtcgttgccccgcccggtgcagccgtggctgcttaactacatcggggggacccatcctctacctcctctcagggtttctctggtgcttctacatctactactggaagcgc

SEQ ID NO: 1235 - DNA, 348 bp, Lilium asiatic
  Clone ID: LIB3229-024-P1-K1-E6
ttcctccaatccttccatcctcttcaaaaattttttttttttatctaaaaaaaaatttattacccaggtaaattaattacaaattaaaatcaacattattaaaaaaaacaatacatataaaaaaaaataaaatacatataaaaggggccgccccttttaaagttccaaattttccttcccctcctttccaccttattactttttttttatttcccccaaattcaatttccttccccgctttttacaaccttctttcttggaaaacccttgctttacccaactttattccctttcaacaaattccccttttcccagcttgttttattcccaaaaagccccccccctttc

SEQ ID NO: 1236 - DNA, 407 bp, Lilium asiatic
  unsure (1)..(407): unsure at all n locations
  Clone ID: LIB3229-024-P1-K1-E9
aagcgtccatcttctccctcgtcttcgctctcctcctgctgctggcttctggtccggaaatagcagaaggaggtcgaactattttctgtggaaaggttccaagcagagggtttcatgggctgtgccttagcagcagcaactgcgcccaagtttgcataagcgagggctaccgtggtggcgactgcagcagcgtgcgacgccggtgcatgtgtaaccgaagatgcaactaagttcagacttctctaccactaccttgaaatggagcttgagtcatgattggctacatcatcactactgtatctgtattatgtattggccaccgtgtgcgtattatgtattatgtattatgaataataaggagaaggctcacgatcttgcggaccatctcctgttgattntcgagctat

SEQ ID NO: 1237 - DNA, 76 bp, Lilium asiatic
  Clone ID: LIB3229-024-P1-K1-F12
ggcagctacatagtacaatcgccagaacatttctcattgtttgctggttggtttattttatggatgattttgtgat

SEQ ID NO: 1238 - DNA, 423 bp, Lilium asiatic
  Clone ID: LIB3229-024-P1-K1-F6
aaatatttattcagcccaagacgccaacgccaaacaacactgtcagatatacaactcactgtccatccccaaaaaacccaaagcagatttacaactaggccttcttcacagcagaggtcttcttcactgccggcgcctttttcacagtcttcggcttcttggcagcaactggagcagccttcttcggcttaatagaaggagtggctttggctgaggccttccctgccttagccggtcgaccagcagtcttaggctttggttgaacagccttcgtcttcactgctgtcttcagctttgcagcagcaggcttggctttaggcttcgcagcagatgattttggcttcggtttcactgctgccttcttcgccttcacagcagtggacttcggcttagcagcagtagactttatcttcggcttggcag

SEQ ID NO: 1239 - DNA, 315 bp, Lilium asiatic
  Clone ID: LIB3229-024-P1-K1-G1
cccacgcgtccgcccaaccaaagatctcacagctccagccctacagtctctcaagatgtctacaaccaaggattcttctgctaaggcgactacgaatccggaagcagtggtggagacgaaggtggtggagacggtcgactaccggtctccggcgggagaagggaagcaggcggtggagaagccggtggaggtggttcatgaaattctaaaggatggtggggataagtctactgctgctgctatcaagcaagactaggtttggacatggccatgaaaatgatcgatctgttgcaagtaataattggatctgatatg

SEQ ID NO: 1240 - DNA, 408 bp, Lilium asiatic
  Clone ID: LIB3229-024-P1-K1-G11
aatgaattccgcgggattgcgtttgttgggggcttcagctatgcagacgtacttgactcggccaaaggttggtcagcgtccataaggttcaaccagcctctgttgcaacagtttcaggagttctaccatcgtcatgatactttcagtcttggtgtctgtaacggttgtcagctcatggcactcctcggctgggtacctggaggtgatgtacggggagcgctcggtgctggtggggatgtatcgcaaccaaggtttgttcacaatgagtctggccggtttgagtgtcgcttcacaagtgttcggattcaggactctccagcgataatgttcaaaggaatggagggtagtacgttgggtgtgtgggctgcgcatggtgaggggagagcgtattttcctgatgatagtgtc

SEQ ID NO: 1241 - DNA, 412 bp, Lilium asiatic
  Clone ID: LIB3229-024-P1-K1-G12
ctgagaatcttttatggagatattcattttcctggagagacagataagatatctaggcactgcggcattttgataccgccagtaacaggaaaaaaaaaaaattctaaggaatcaaaaaaattgaaagattggatctatgtccagcggatcacacctaccaagaaaaagtattttgtttcggttcggcccgtagtcacatatgaaatagccgacgggataaatttagcaacactttttcctcaggatctcttgcgggaaaaggatgatgtccaacttcgaattgtcaattatatcctttatgaatatggcaagtcaattcgaagaatttataacacaagtattcaattagttcggacttgcttagtattaaattgggaccaaaaacaaaacggttccaaaaaagaggtttatg

SEQ ID NO: 1242 - DNA, 313 bp, Lilium asiatic
  unsure (1)..(313): unsure at all n locations
  Clone ID: LIB3229-024-P1-K1-G3
cgtgtctcnctccttctctcacttcaacctttttctcaacctttctcatccccctttcttggcgaaccggcggcccaatctccagcgtcgccgccagtgggtccatttctctttggaccacaccccagatgcgtcagaggaagatgcaaggcgctcaaccacctgcctaacctgagatcaacgctcacgagctcctacttctctctctctatctcattgctttccttttggaaattaaatctcgagcttacatttgtctcccccctgcaggaattgcatgaaggacggttgagatttcacgcatgcgagcaaa

SEQ ID NO: 1243 - DNA, 359 bp, Lilium asiatic
  Clone ID: LIB3229-024-P1-K1-G4
cacacactacacatgcatatagagtgtgaagaatttagtttgttggcctgggttaactatttgatgaaatattctttcaaatttgtgattatctttgcaatttatcaaaaaaaaaaaaaaaaaaaaaaaaaaaaaaaaaaaaaaaaaaaaaaaaaaaaaaaaaaaaaaaaaaaaaaaaaaaaaaaaaaaaaaaaaaaaaaaaaaaaaaaaaaaaaaaaaaaaaaaaaaaaaaaaaaaaaaaaaaaaaaaaaaaaagggggggccccttttaaagaaccaaatttttcttcccggtgattggaaggttatatttttttttaagggccccaaaaataaaaataatgggccgggttttaaaa

SEQ ID NO: 1244 - DNA, 400 bp, Lilium asiatic
  unsure (1)..(400): unsure at all n locations
  Clone ID: LIB3229-024-P1-K1-G5
cccacgcgtccgcccacgcgttcgcccacgcgttcggatttcacgcatgcgagcaaaagctatcaagcaaggaaggaaacgatcatgcacggagggccgagatctgaagaagatgctggatggctctgatgaggtgaaggtacgatgtgcagttctgatctgacggcgaagaggaaggccgtgcatggagcttctagaagcgcatgtggaaggagctctccattggacgcgcatgtgaagtgctcgaagcagaagacggtgccgggccgaagtcgaagtctataaaagcacctagccgatcaaagaattctctcaagtctcagacgaagaagaagacctctcgttctctgagcctncttcattcatacacatcttttagtgacagagttgagtttgggga

SEQ ID NO: 1245 - DNA, 112 bp, Lilium asiatic
  Clone ID: LIB3229-024-P1-K1-G6
aattgacagagaatgtactgtttgcaatccaaagttttattcatggtggggaatatccacctagcgggaaatatttatctataatttatgttcttcagaacaattatcattg

SEQ ID NO: 1246 - DNA, 61 bp, Lilium asiatic
  Clone ID: LIB3229-024-P1-K1-G7
tctgtagcggtccagcgcaggcggggggtccagctatgcaaatggctagtacaagctacac

SEQ ID NO: 1247 - DNA, 95 bp, Lilium asiatic
  Clone ID: LIB3229-024-P1-K1-G8
tttgatgctatttctttatgttctgagaaccttggtatttttgttggactaaattagaattgtggtcggtaatcttatgctatttggttcttgtt

SEQ ID NO: 1248 - DNA, 409 bp, Lilium asiatic
  unsure (1)..(409): unsure at all n locations
  Clone ID: LIB3229-024-P1-K1-H10
aaatacttcaccaaggattttcatgggacgatcgggtcgttcggcgtgaagcagattgacaccacaggagctggcgatgctttcgtcggtgccttgctccggcggctcgtcggagatttatcggcgattcaggatgagaagaagctgagggaggtgctgagatttgcgaatgcttgtggggcaatcaccaccaccaagaaaggagcaatccctgctttaccgactgaatcggcggtcatcgagttcatgaaagagcttagggcttagggtattacgtggagttagttgtgtttgcagtgcctgtttatctgataagttcgttgattctcgttataggctttttgttttttctttatttccatcgatgcgtattttggttntttattaatcaaggaataaagtttatccg

SEQ ID NO: 1249 - DNA, 399 bp, Lilium asiatic
  Clone ID: LIB3229-024-P1-K1-H3
cccacgcgtccgaatgattctcagtgtgtttagtacatactcaaggctgaaagtcaatttctcggaaagtgctctttctcagataaggggtcatgaaaatcttcagcgggcagcccaaataccaacttgctctgtcagtaagctacctactatcttcgtgggagaaagaactttgggatggagtcttggaaaacgttcaatagagaaaactctaatttaactcttatacaaggtgtgctatatggcttttcaacctattacatgtctttggataagataccccaaaaatgtttcttctagaattgataagatgaacagagtttctgtggaaacacttggatgggagaaggaaagtgcatggtctgagatgggacatgatctgtctgccatttttttttt

SEQ ID NO: 1250 - DNA, 434 bp, Lilium asiatic
  Clone ID: LIB3229-024-P1-K1-H4
ttagggagaagcggaaggagcggaactttgataagaagatccggtatagcgttcggaaagaggttgctttgaggatgcaacggaacaagggtcagtttacatcatccaaatcaaagcctgaagaaacgactccgggtgaaaccagttgggatgccacccaacagtggggttcagtggatggtcgtcctccagcagcaccagaatgtcatcactgcggcatcaatgctaaatctactccaatgatgcgtcgaggtcccaatgggccaaggaccttatgcaatgcctgtggacttatgtgggctaataagggtacactgagggacctttcgaggactccggccatgattcccattcaaaatgtgttgcctccacaccaaagtacctttccagaatcacagaaggttggggattcaaccaactcagccacaggtgag

SEQ ID NO: 1251 - DNA, 218 bp, Lilium asiatic
  Clone ID: LIB3229-024-P1-K1-H5
ttcccgtattccccaggcgtgcctttccttcaaccagaaggagcggtaactttgataagaagatccagtatttctttcggaaagatgttgctttgaagatgcatcgtaacattgttctctatacattattcaaattaatccctggagatacatctccgattgaaaccagctgagattccacccaacattgagatttattggatggttgttctccatca

SEQ ID NO: 1252 - DNA, 371 bp, Lilium asiatic
  unsure (1)..(371): unsure at all n locations
  Clone ID: LIB3229-024-P1-K1-H6
tgagaattataatatatacccttaatattggctaataattaaaatttaattctctcttacaatatgtatttcccatatatcctgaattgtatttcaaaatttaaattttttctatcattatagataaaataattaataaggacaaatttgattggaacaatgatttatatcttttgggaagtagaaaaaagttaaaaaaatatttttatgtgtaaaagtaatttattatgtgtgtctcataataaatgtattcattaaattatgactatatacactacaataaattttgtattaaataaataaagcatatatgttatgtggcaaaaagaaatttgaatatttgaaatgagaaaaataattntataattaaa

SEQ ID NO: 1253 - DNA, 97 bp, Lilium asiatic
  unsure (1)..(97): unsure at all n locations
  Clone ID: LIB3229-024-P1-K1-H7
gagagccccnnggagcagcacgaaggaggagggtgaaggggcccacgagcncaccgccggagacaggaggaaccncaagaagagggagaccaaagca

SEQ ID NO: 1254 - DNA, 157 bp, Lilium asiatic
  Clone ID: LIB3229-024-P1-K1-H8
ttctccgcagcgtttagcatagtttaagctcggagaaccctttatcgggcaatggagggtgtgttgggtcatgaataactgccgtagacaggagaaccttagatgagtgagatcaaatatgttctaatggcagggtgtgttactttgaggctccata

SEQ ID NO: 1255 - DNA, 219 bp, Lilium asiatic
  Clone ID: LIB3229-025-P1-K1-A1
gtgtgtgtggtggccctcctatggatggggacggtgctgtggatgttgttgctgccgcttttcctttgtttttgtttcggtgttatcggtgcctagctaggattgtgggtgatgaagatgtattatctatgaaaggaggatgttgtaggtggtgtttttctctaagtggaaagatccatggatgtgtatgggatattatggttatttggtttacatcta

SEQ ID NO: 1256 - DNA, 385 bp, Lilium asiatic
  Clone ID: LIB3229-025-P1-K1-A10
aacgataggatcttggatctgctgcaagtgtgtttcggggaaggattgatcacgatataccagatgacaaaagggttctctagggttggggacgcacttgatgatttggctcttgatatccctaatgctaaggagaagtttgactcatatattgagcatgctaagaagcatggttggctgatgccatctatcttggctggcgtttcccccccagttgctgcagcaacttaggaaataccgtctgattactgcatctatttcctttgctactgccggtggtattattgctgtttgtacttctgtcaaccaggtagggaggtgtttcatcatttctggtgttatcttattataggtacgcaattcagtttgccattaggaacggaac

SEQ ID NO: 1257 - DNA, 388 bp, Lilium asiatic
  Clone ID: LIB3229-025-P1-K1-A11
ggctctgatattttcacacactgaaagatatccagatgaatccccacgattaaatgttaaaagtgtacggggaataacgcctgcggatcttgcaattctcaaaaagaagcttgaacaagaggcttttgagaatcttggcatggcaatggtctacacccttgttacatatgctcaagagtggttaagtgaaaagttcagtcatggagctgaagtagaggattccgaggaaactgatacagctaaagatagtgtggttgttccacatggtgaaccagttactattgagacatttcttgcttggagagagctatatgaagcagagttggcattagagcgagccaagctaatgccagagtcgtccctttccggttccaaggaaaggaagcta

SEQ ID NO: 1258 - DNA, 415 bp, Lilium asiatic
  unsure (1)..(415): unsure at all n locations
  Clone ID: LIB3229-025-P1-K1-A2
acccacgcgtacgcgtgggcggacgcgtgggctccaactcttctcagctctccctccatggctagctcctccgtcgtctgctccctcctcttccttgccttcctcatcggcacagcctcggcaatcacctgtaatcaggttgtctctaacctcacctcctgccttggctatgctagaaagggcggngtcatcccaccgggctgctgcgcgggtgtgaggacccttaataacttagccaagaccactcctgatcgccagactgcatgcaactgcctcaagtctctggtgaaccccagccttggactcaatgctgctattgtcgccggcatccccgccaagtgcggcgtcaacatccnctacccgatcagcatgcagactgattgcaccaaggtgaggtaaatctctgtatggagcc

SEQ ID NO: 1259 - DNA, 408 bp, Lilium asiatic
  Clone ID: LIB3229-025-P1-K1-A3
cccacgcgtccgcttcattcgaagcaaatcagcgatgtcgggtcgaggcaagggcgggaaggggctgggcaagggcggcgccaagcgccaccgcaaggtcctccgggacaacatccagggcatcaccaagcctgccatccgccgcctcgctcgccgcggcggcgtgaagaggatcagcggtctcatctacgaggagacccgcggggtgctgaagatctttctggagaacgtcatccgtgatgcagtgacctatactgagcacgcccggcggaagacggtgacggcgatggatgtggtctatgcgctcaagaggcaggggcgtactctgtacggcttcggcggctgatgggtttggtctcctgcaagctttagtggcgcttttctctggtgtctatttccttttttttg

SEQ ID NO: 1260 - DNA, 313 bp, Lilium asiatic
  Clone ID: LIB3229-025-P1-K1-A4
ggcgccgaaaggatggggtctacatgtactttgaagataatgctggagtgattgtgaatccaaagggtgaaatgaaaggttctgccatcactgggccaattggaaaagagtgtgctgatctatggcctcgaatcgcaagtgctgcaaatgctattgtctgatgctacaactcctattctgatgaattgagtttctcgtgctttattagtatcttatgtagtgcttaaatctgaatttggttctatctagttgagcacaaattttgttggaagaaaaaaacagaaaaaagaagaggaatatgcactcaaaaagc

SEQ ID NO: 1261 - DNA, 396 bp, Lilium asiatic
  Clone ID: LIB3229-025-P1-K1-A5
gcctgcgaatgcgactgctccgtccagcccctcctctcgctcccggaagaattgagcaatggttcctttacagattgtgcaagaagagacccagatgtaagcgaagaaatggaaaagaacttcacagacctcctcgcagaagaactgaaactgagagaagcagaggcgacagaggctcaaagacgcgctgacgtgatgctgctcgaggccaagagatcggcatcccagtaccagaaggaggccgataagtgcagctcaggaatggatacatgcgaggaggcaagagagagagcataggctgcattgttagaacagaataagtcatctgcaatgtgggagcagagagcgaggcaacagggctggaaaccagggaatctgaagtctcaaatgtgagct

SEQ ID NO: 1262 - DNA, 302 bp, Lilium asiatic
  Clone ID: LIB3229-025-P1-K1-A7
cgagattgccattgcaaatcaagacgcatagaggagccatttgagttctttgagcttttgaatgaagtggtggtaaataaaagccgctgtgaaatttcaaagaggaggatctgctctaattatccttcacccatttttctttcttcttctttttttcctttgtaatgtcgacagaggcattgtgtcaatgtgtaagggggagcaactgtcgatgtacattgtgttataggaggactgatgctatgtttttatgtagcagacactcggagcaattaataaatcatgttaatggcaagttatat

SEQ ID NO: 1263 - DNA, 238 bp, Lilium asiatic; identical to SEQ ID NO: 1063
  Clone ID: LIB3229-025-P1-K1-A8

SEQ ID NO: 1264 - DNA, 388 bp, Lilium asiatic
  Clone ID: LIB3229-025-P1-K1-B10
ccaaagcttgaatcatgtctgggcggggtaaaggtgggaaggggctcggcaagggtggcgccaagcgccaccgcaaagtgctgagggacaacattcagggcatcaccaagccggcgatcaggcggctggcacggcgcggtggcgtgaagaggatcagcggcctcatctacgaggagactagaggagtgctgaagatatttttggagaatgtgatccgtgatgctgtcacctacacagagcatgcacgccggaagacagtgacggcgatggatgttgtgtatgctctcaagcgccagggacgcactctgtatgggttcggaggctgatcttcttctgcactgggatcgactgtgggggtatcgcttgttgttaggagtagatcttgttt

SEQ ID NO: 1265 - DNA, 360 bp, Lilium asiatic
  Clone ID: LIB3229-025-P1-K1-B11
ccaaagcttgaatcatgtctgggcggggtaaaggtgggaaggggctcggcgggggtggcgccaagcgccaccgtaaagtgctgaaggacaacattcagggcatcaccaagccggcgatcaggcagctggcacggttcggtggcgtgaagaggatcatcggtctcatttacgaggagacttgaggagtgctgaagatatttttggagaatgtgatccgtgatgctgtcacctacacagagcatgcacgccgtaagacagtgacggcgattgatgtaatgtatgcttagaagcgcgagggacgcactctgtatgggcttggaggctgattctttttttgtactgggatcgactgtgggggta

SEQ ID NO: 1266 - DNA, 390 bp, Lilium asiatic
  Clone ID: LIB3229-025-P1-K1-B12
cccacgcgtccgtataatgccaaactctctgattttgggcttgctaaggatggtcctgagggtgacaaaactcatgtatcgacgcgagtgatgggaacatatggttatgctgctccagagtatgttatgacaggacacctgacatcgaagagtgacgtatacagttttggagttgtcctacttgagatgttgacaggccggaggtccatggacaagaatcgcccgaatggtgagcacaacctggtggaatgggcgcgccctcatcttggcgaaagacggcggttttacaggattatagacccacgtcttgaaggtaacttttccatcaaaggcgcacaaaaggcagctcagcttgcgcatcactgcctcagccgagatcccaaagtaagg

SEQ ID NO: 1267 - DNA, 56 bp, Lilium asiatic
  unsure (1)..(56): unsure at all n locations
  Clone ID: LIB3229-025-P1-K1-B2
atggaagtagctgtttggattctaagctgnccaaaaaaaaaaggggggggggaagt

SEQ ID NO: 1268 - DNA, 278 bp, Lilium asiatic
  Clone ID: LIB3229-025-P1-K1-B3
cccacgcgtccgattgcccatggcggagtcctccccaacatcaacccagtcttgctgccaaagaagaccggaaaggagggtacagagcccaagtcaccaaagaaagctaccaagtctcccaagaaggctttatagttgttgatttgattttggtcgcttgtatgtaatcccctagattacatgaacttggaattatgaaatttgtctgccagtgttcttagttggaaatgttttgtcctaattgttccgtgttctgaattggaataattgttggtttt

SEQ ID NO: 1269 - DNA, 350 bp, Lilium asiatic
  Clone ID: LIB3229-025-P1-K1-B4
ggtccagcgagagatctgagctcgatcgcccgaagatgagggcgaagtggaagaagaagaggatgaggaggctgaagaggaagcgccgaaagatgaggcagcgatccaagtagatcctgatgcagcggccttcatcatgtggaagatagtcgatggtcttacatcttgccggtctttcatcttgctgttggtttctctgttgatgtctagcatctaaatttcctgttttgcagctttagtaggttctaagactttaaatgttatgcttttgttgacaatgtgtgagacaatggtgttgaaccatatttgatctcttttgagatgtttaatgttgaagcgtagttatttct

SEQ ID NO: 1270 - DNA, 358 bp, Lilium asiatic
  Clone ID: LIB3229-025-P1-K1-B5
ggatgctctgggactgttgtgaaaagagaatctggagattctcctctgcagctaggtccaaaggctgaaggactgtagaaaaagcgctgctcaatcgcatgatacttttcatccagcgctatcctgatggaaccatatctatggcgtactacatgttggttcgcattaccttgtggatgaatgtaatgatggtgccaaaaggtatgccgatgtgtaccatatagctgcactggcgtcatattttaatgggtgctaagactataaatgatgtgctctatgttgacaatgtgtgagacaatgccgttgaaccatatttgatctcttttgagatgtttaatgttgaagcgcatttatttct

SEQ ID NO: 1271 - DNA, 278 bp, Lilium asiatic; identical to SEQ ID NO: 1268
  Clone ID: LIB3229-025-P1-K1-B6

SEQ ID NO: 1272 - DNA, 398 bp, Lilium asiatic
  Clone ID: LIB3229-025-P1-K1-B7
cccacgcgtccgtataatgccaaactctctgattttgggcttgctaaggatggtcctgagggtgacaaaactcatgtatcgacgcgagtgatgggaacatatggttatgctgctccagagtatgttatgacaggacacctgacatcgaagagtgacgtatacagttttggagttgtcctacttgagatgttgacaggccggaggtccatggacaagaatcgcccgaatggtgagcacaacctggtggaatgggcgcgccctcatcttggcgaaagacggcggttttacaggattatagacccacgtcttgaaggtaacttttccatcaaaggcgcacaaaaggcagctcagcttgcgcatcactgcctcagccgagatcccaaagtaaggcctcttat

SEQ ID NO: 1273 - DNA, 278 bp, Lilium asiatic; identical to SEQ ID NO: 1268
  Clone ID: LIB3229-025-P1-K1-B9

SEQ ID NO: 1274 - DNA, 395 bp, Lilium asiatic
  Clone ID: LIB3229-025-P1-K1-C1
aagtttcagtgcatactcccgtgggtatttaccttactccctacacattataccagctaaggtcatcatatttaaggggtataattgaacaatacactttaaaacaaggttgtggcacactaattgaagcatctcgccgaattttagaaccaaaatgtcccaaatgcgcacgcattccagagggttgcctgtgcaaatttaaataattagaataaatgcgtgcgcatctctaattagagcgcgcacatttgaattaaatcagaaaacccgagagcactgatttttgtgtactggaaatcgcgtatgcttttaacataatgcgtgcacattttataaatagcacacgcatattagaattgtgcgtgcgcaaatgcaaaggcaaaaattaaattaaa

SEQ ID NO: 1275 - DNA, 387 bp, Lilium asiatic
  Clone ID: LIB3229-025-P1-K1-C10
cccacgcgtccgatccgctgcacaattactttaagcaggctgattgcttgaactatttcttttgctttcgttggattcttatacagttcaaaagggaatttccgtacgagaagatcatgcatctttgggaagtactgtggacacactacttgtctgagcacttccacctgtacatgtgcgttgccatcttgaagcagtaccgcagaaagatcatggacgaacagatggatttcgacaccctcttgaagttcatcaacgagctaagcgaccacatcgatcttgataggacgataagggaggcagaggccttgtgtgtcctcgcgggggagaatggagctgcttccattccaccgggtaccccaccatcactgccgattgatacagaca

SEQ ID NO: 1276 - DNA, 387 bp, Lilium asiatic
  Clone ID: LIB3229-025-P1-K1-C11
cggacgcgtgggcggacgcgtgggcggacgcgtgggtttgaatgctttgaacaaatttagatttctcagcccgaaagacctcaaggaaagattctgtacaaccaagggtattgagaagattgcaatcggcgaaattcaaatgtttacttggggatgcaagaattatgtgggcaatacttggacgagctagatccaatgatcggtaaagcctctcttgttgattacactactattattgtgccattgatgaaatactgcatgaagaagcgattgtacaatctattgggacaacacgttaggagtcggttggagtatgaaggagaaacacataaaactgagacaggtgatcaactggttatgtgtttatctattattatttgggcattt

SEQ ID NO: 1277 - DNA, 301 bp, Lilium asiatic
  Clone ID: LIB3229-025-P1-K1-C12
tgatgaacaaaatgaacattccagctccatttcgcatggcattgccaactccacccctacatcctcctcaagcgcctgcttctcctcccccctcgtctcctattgcagcaaaacctaaatctgccgagtcttccagtgacgagtctgagtgggaatcatcagaggaagacggtgttggtgcgagaacagcaaagcgagcaagacgagaagccattgtagggcctgcaattgataaagctgtgtcccatgaagctgttggtttgaaacctgttaccttggttccgaaagaggcccaagtgat

SEQ ID NO: 1278 - DNA, 399 bp, Lilium asiatic
  Clone ID: LIB3229-025-P1-K1-C2
tttaaccggaccttcgttttctttatcttaatgaaaaccgctttaccggaaaagttcctcccgaattggggaatcttaaaaacctccggcatcttgatgttggcaacaaccacttgactggaacgttgagggatctcatccgtaatggcgatggctttatttctctccgcaatttatacctaaacaataatcaattgagtggcggaattcctgaccagctggcaaatctgaccaatcttgaaatcctgtacctgtcgtacaacaagatgactggagcaatacctcaaaaactcgttacaatcccaagactaacctatttatacgtggatcacaatgggttcattgggaggattcctgaagggttgtataagcacccattcctgaaagaactgtacatcg

SEQ ID NO: 1279 - DNA, 366 bp, Lilium asiatic
  Clone ID: LIB3229-025-P1-K1-C5
gcgatttagcctctgcataaaaatacatcaaacggactagaagttaacatacagaaccaattctcgtaatttcttacaagtgatcaacctcttcttagagagaagggaatcaacaagttctaatttcgttattagacattctaatacaccaaatgggtagaggttgtgacatactagatctgtatcctggaggaactgcagtacgttgagctcgagccagggatcatgcgcgcgtacaaacctccacccctcggtctcctcgacagctgcaaagctcttggcaatccacttcatgcaacgaatgtacagttgtgaagcatcacactgtctcgcaagatgaagtacatccaccaccacctctgttgt

SEQ ID NO: 1280 - DNA, 386 bp, Lilium asiatic
  Clone ID: LIB3229-025-P1-K1-C6
tccaatttaatcattactcaccaagtattaatgtacatgtattaattttgattgcattttcaacctagtggtgtctctttacttaattatttaaaattctgtttttataatagtaaatataatttatctatactttcccccatatttcaaaaataaattggcttgaaattgcataaaattccaaaagttgaactttgttaatgtacctaaatctgggcttgcggattagaatacatcaatacagataaatttcagattgctgtttcagatttatgttgacatacaagatgtataatttatcccaggttcttccctgctcgtgtattcgtactcaggatcaagtttatattgtctgctataatattttctgcctcaaatgttttcag

SEQ ID NO: 1281 - DNA, 244 bp, Lilium asiatic
  Clone ID: LIB3229-025-P1-K1-C7
tggtcaacaaaatgaacattccagctgtatttcggatggcatatgccaagtggggggcgtacatgcttctgaagcgcactacttctccgtccgattcgtctcctattgcagcataacctaaatctgacgtgtcttacagtgacaagtcactgcgggattcatcaaaggaagacggagttggtgcgcgagctatatagagtgcacgacgagaagccattggaggacctcgataagattaagtctg

SEQ ID NO: 1282 - DNA, 391 bp, Lilium asiatic
  Clone ID: LIB3229-025-P1-K1-C9
tacaatttaatcattactcaccaagtattaatgtacatgtattaattttgattgcattttcaacctagtggtgtctctttacttaattatttaaaattctgtttttataatagtaaatataatttatctatactttcccccatatttcaaaaataaattggcttgaaattgcataaaattccaaaagttgaactttgttaatgtacctaaatctgggcttgcggattagaatacatcaatacagataaatttcagattgctgtttcagatttatgttgacatacaagatgtataatttatcccaggttcttccctgctcgtgtattcgtactcaggatcaagtttatattgtctgctataatattttctgcctcaaatgttttcagtacgt

SEQ ID NO: 1283 - DNA, 394 bp, Lilium asiatic
  Clone ID: LIB3229-025-P1-K1-D11
gtcggcccggccaacaccgtgagcctgggcgcctatggctcaggcgcccacatcctgaacctgacgccgacctcgcacatcaccggcgacgtggtcacgctgggcacgagcggccagatcggcgtggcgtcgggcgacaattcgggctcgatccacaccaccaccggcgagctctacctgacggccggcagccacgtctacctggacaacgaccgcgacctggccagcctgtcgctgtacgccaccggctcgtcggcggccacctaccagatcctgtcgaacgaactgctgttcgatgtggcccataacggcagccgcctgcaggtcaacgaggtgcgcgacaacaccgggctgaacctgatgctgtcgagcaacgtcggccaggacatcggca

SEQ ID NO: 1284 - DNA, 393 bp, Lilium asiatic
  Clone ID: LIB3229-025-P1-K1-D2
cccacgcgtccggaaggagacgagctcttccggcaacgatccgcggcagccgtcgacggcgaggccgtacgcgcctccggcgatctctgcccaggatctccccgtcgactatgcgggcttcctagccgtggccttcggaatctccggcgtcatgttacgctacaagctcttgtcatggctggcaataattttttgtgccgagtctctttcaaatatgaagaattacgaaaatgatctcaagcaggttatgatggctatgatgtttgcaattatgggattggtgacaaattatttcggaccgaaccggccaagcaacccaaaaggctaacctttcagattcatgaagctagactacattcctggagcctttctattctagctaaaatgttgcct

SEQ ID NO: 1285 - DNA, 247 bp, Lilium asiatic
  Clone ID: LIB3229-025-P1-K1-D3
ctggtgccaaggtgaccaaggctgctatcaagaagaagtgaggtgttcttctatttatgtccgagtttcttaagaactgcaagagtctagttggtaatgcttgtttttgtttgtcgaactttcgtgttgttaggtcagtggttccgatcaaactatacgcttcaggcgctttgatatggcctgtcagtaatgttattgtgcacgaggctcctctgctattatgaagaatttaccaaatatgatcttc

SEQ ID NO: 1286 - DNA, 384 bp, Lilium asiatic
  Clone ID: LIB3229-025-P1-K1-D5
gtcgtttagggcgattgtggtggtgggggacaagaaggggcaggtgggggttggggtggggaaggcgaaggaggtggtggatgcgattgttaagtctgcggtgaatgcgaggcggaatatcatctcggtgccgatgacgaagtactccacttttcctcacagatctgatggggactacggggctgcaaaggttatgctgaggccagcctcaccaggaaccggggttatcgctggtggggcagtaaggatagtactggaaatggctggcgtggagaatgctcttggtaagcagatacgaagcaagaatgccctcaacaacgcaagagccaccatcatggctgtccggaaaatgaggcagttcagtgatgttgctcgtgagcgcgg

SEQ ID NO: 1287 - DNA, 346 bp, Lilium asiatic
  Clone ID: LIB3229-025-P1-K1-E1
agtcgaaaccccggaaaaccaactggataaagcgggtcgtacgacccgtggtaaaaactactatgacagtgaagatgaaaatattagcaaggcgtggttagtgatctcgcaagagccagtcctgggggcaaaccaagagaaagatgaattttgtgaacaactagctgaggatgtgggttaacataacaaggaaggccccgctcggagtgtcccattgggacaaggcaagatggtgccagatcaagcgaagatgtgcaaaatgtacaagttaagtagctactgagaagggcaaatggagtgaagccgacaagggggagagggcgaaagaaaggtgggggaaagaaaa

SEQ ID NO: 1288 - DNA, 251 bp, Lilium asiatic
  Clone ID: LIB3229-025-P1-K1-E10
cccacacatccgattcttatccacacttatttaatgagacacaaaaaaacaggggtggagccgatcaaaattctcataccaatattttcacacaaattacgaattgtaatcgaagattttaaacaatcttatatatcaaataattctctctttttatacaaagtagatccatatttattcctcactcatacatcaaacctttgcttaaagtcaccataatactactccactagctctatttttaactattt

SEQ ID NO: 1289 - DNA, 361 bp, Lilium asiatic
  Clone ID: LIB3229-025-P1-K1-E12
ctcgcactgctcgacacctgatgatgccaaagtctaaaccccggaaaaccaacttgataaagcgggtcgtacgacccgtggtaaaaactactctacccgtgaagatgaaaatatttgcatggcgtggttggtgatctcgcaagatccagtccttgtggcaaaccagcagacggatgaattcttcgaacatcttgctgagcatttgggttaacataacaaggaaggccccgctcggagtgtcccttcggtcaaggcaagatggtcccagatcaagcgggcatgtgcaaaatgtacaagttctgtagctactgtgaagggcagatcgagtcaagccgacaaggtggagagggcgaaggaaatg

SEQ ID NO: 1290 - DNA, 397 bp, Lilium asiatic
  Clone ID: LIB3229-025-P1-K1-E3
gtgaagccttgactctgcggctaataaggaacctgcagcaaaacaattacataccaacataataagttgaaccatggtatttaacttgtctcaccaacagatgtgttcagaaggttcctcactattaactgttcatgttaccggattgaagaaattgcatggtgtgccggagaaccccacatagagaattgtcagcaacctgaaggaatttatgcagaaaaatgggttaccaaatggtctcggacctggtaggcgcaatggacttgagagtgctggacagggggcaatctctcagctctacaaaatattggagtcatctgtggttggacatgacagtcaatctctgaatggcgggcagatcatttggctccatcttggagttaatagtggagcatcg

SEQ ID NO: 1291 - DNA, 386 bp, Lilium asiatic
  Clone ID: LIB3229-025-P1-K1-E4
acgcgtacgcccacgcgtccgcccttctggaccacctctgggtacagacccgaacatgcgtggcacttgcaattactggagcactcatcctgctgcaatatgggcggcatttggctactggggcaccatcggctagttctttggcctgccagctactgcggcgtttgagaggaatctgagcgtgcacgaggcacttgcgaacactcgtgccgatggcatcagggctcttttccgtgaagggacggcatctttgctcaactcacatggctaattagaagtgtgcgttcactactcaacatgtgagggatggctgcactgcagccgtgggatcgaacaaggcagcggagtctcacgcagagctattcaagcacgcccatgaacggcac

SEQ ID NO: 1292 - DNA, 390 bp, Lilium asiatic
  Clone ID: LIB3229-025-P1-K1-E5
cccacgcgtccgattcaaattgttgacaaaggaagtgaatggtcagactcagccatatgagacggataatatttcagatatcgcatttgtagacaagatagaagtgaaaggggttttgtacaaactttggaagaatgaattcttggatatggagaaaggagtttcatatgcatccggacagatgcagcaattcttgtggagagtgaacaaaagaacactttgggaacttattcagaacgaattgtatcatggagcattaaatatcagcctaaggattgctcacactgtcaagcaacaacatgaggatgtagtgactgggaaggaaaaagagcaattattaagaagtcgatggatcttggaatcttccctcttgaagattgacgacactct

SEQ ID NO: 1293 - DNA, 348 bp, Lilium asiatic
  Clone ID: LIB3229-025-P1-K1-E7
ctcgcactgctcgacacctgatgatgccaaagtctaaaccccgggacaccaacttgataaagcgggtcgtacgacccgtggtaaaaactactctccccgggaagatgaaaatatttgcatggcgtggttggtgactctgcaagagccagtcctcggcgcataccaggatacggatgaattcttctaacatcttgctgagcatttgggtttacataacagggaaggccccgctcggagtgtcccttcagtcaaggcaagatggtcccagatcaagcgagcatgtgcaaaatttacaagttctgtagctactgagaagggcagatcgagtcaagccgacaaggtggagag

SEQ ID NO: 1294 - DNA, 310 bp, Lilium asiatic
  Clone ID: LIB3229-025-P1-K1-E8
ctcacactgctcgacacctgatgatgccaaagtcgaaaccccggaaaacggacgggataaagcgggtcgtacgacccttagttaaaactactctaccagagaagatgaaaatatttgcaaggggtggttggtgacaaggcaagatccaggccttgtgtcacaccagcagacagatgatttcttcgaacaacttgctgagcattagaattaacataacatggaaggcctcgctcggagtgtccattcgatcaaggtaatatggtcccagatcaaacagtcatgggcaaaatgtacaagatcagtaggtact

SEQ ID NO: 1295 - DNA, 72 bp, Lilium asiatic
  Clone ID: LIB3229-025-P1-K1-F1
aaaaaaaaaaaaaaaaaaaaaaaaaaaaaaaaaaaaaaaaaaaaaaaaaaaaaaaaaaaaaaaaaaaaaaaa

SEQ ID NO: 1296 - DNA, 366 bp, Lilium asiatic
  Clone ID: LIB3229-025-P1-K1-F11
gctcaaaccactcatcaatcatgtcaggacgcggcaagggagggaaggggctcggcaaaggcggcgccaagcgtcatcgcaaggtgctgcgggacaacatccagggcatcaccaagccggcaatccgccgccttgctcgccggggcggagtgaagaggatcagcggcctcatctacgaggagaccagaggggtgctcaagatctttctggagaatgtcatccgcgatgctgtcacctacacagagcatgctaggcggaagacggtgacggcgatggatgtcgtctatgctctcaagcgccagggccgcaccctctatggatttgggggttgatcttttcctgttctatctggatctctgtttgtct

SEQ ID NO: 1297 - DNA, 119 bp, Lilium asiatic
  Clone ID: LIB3229-025-P1-K1-F12
gctcaaaccactcatcaatcatgtcaggacgcggcatgggagggaaggggctcggggtacgctgcaccaagcgtcatcacatggtgctgcgatacaacatccttggcatcaccaatcct

SEQ ID NO: 1298 - DNA, 63 bp, Lilium asiatic
  Clone ID: LIB3229-025-P1-K1-F3
cccacgcttcctccaacgcttcctcccacgcttccgcccacgcttcctcccacgcgtccggtt

SEQ ID NO: 1299 - DNA, 393 bp, Lilium asiatic
  Clone ID: LIB3229-025-P1-K1-F4
gcttgaattcccctctcaaactccatccaatggcccgcaccaagcagacggcgaggaagtccaccggcggcaaggccccaaggaagcagctggcaaccaaggcggcacgcaagtccgctccggccaccggcggagtgaagaagccccaccgcttccgtcccggcacggtggcgctccgtgagatccggaagtaccagaagagcaccgagctgctaatccgcaagctccccttccagcgccttgtccgtgagatagctcaggacttcaaggctgacctccgcttccagagctcggcggtggcggcgctgcaggaggcgtcggagtcgtatcttgtggggctgtttgaggacaccaacctgtgtgccattcacgcgaagagggtgactatcatgc

SEQ ID NO: 1300 - DNA, 338 bp, Lilium asiatic
  Clone ID: LIB3229-025-P1-K1-F7
gccagctgcagcgccggcagcagttgaagagccagctgctgcggaagctgcagctccggtagaggaaggtaaggtggaggaggtgaaggagtctactccagtgtgattagcatttacgtgcttgtgcgttttgttcggtaagggttttactagggtttgagtataataatgaagggagagagggggctgtgtgttgaagttacgggctattttattaagtagtttggtttatatttgcgggtggtttgagattgtatttgtaatttttattaatatgtcactatggtcgcttgtaacgttggattacttatatgttgtaagaaatttttatagtttgg

SEQ ID NO: 1301 - DNA, 182 bp, Lilium asiatic
  Clone ID: LIB3229-025-P1-K1-F8
gccagctgcagagccggcagcagttgaagagccagctgctgcggaagctggggggggggtagaggaaggtaaggtggaggaacgaaaggagtctactccagtatgaagagcattaacgagcaggtgccttctgtgggtggaggggcgaactgaggagggaggaaaataatgaaaggagagag

SEQ ID NO: 1302 - DNA, 57 bp, Lilium asiatic
  Clone ID: LIB3229-025-P1-K1-F9
acggtcagctgcatggcctggtgcatttgaagagccagatgttgaagaaggtggggg

SEQ ID NO: 1303 - DNA, 388 bp, Lilium asiatic
  Clone ID: LIB3229-025-P1-K1-G10
aggacagggtgagtatccatgaggccatggaacaacagagcatcagtatatccaaggcaggaattgttacatctctccaagctcgctgtagtgtcattgctgctgcaaaccccctaggaggaaggtatgactcatcaaagactttctcccaaaatgtggagcttacagatccaattgtttctcggtttgatgtcctctgtgtagtaaaggatattgttgatccagtcatagatgaaatgcttgctaagtttgttgttgatagccactccagagcacaaccaaaaggggaaaatatagataacaagcatgcaaactcccaagatgatatgtcatcagacagaccatctgatccggagatactttctcaagacatgctcaagaagtattt

SEQ ID NO: 1304 - DNA, 390 bp, Lilium asiatic
  Clone ID: LIB3229-025-P1-K1-G12
caggactcagatccagatgcaactattgtggagatcacttttggtgaccgtctgggatctcttctcgacactatgaatgcccttaagaatttaggtctgaatgtcgtcaaagctagtgtattcttggattcttcgggcaagcacaacaagttttctatcacaaaagcttcaactggtcgtaaagttgatgaccctgagttgttagaagcaatacgcttgacgattataaacaatctgctcgagtatcacccggagtctagcacccaattggctatgggagcaacttttggggctgagccaccaacccaaacgattgatgttgatattgcaacccgtgtaaatgtttatgatgatggccctgacaggagcttacttgtggttgaaacagct

SEQ ID NO: 1305 - DNA, 371 bp, Lilium asiatic
  Clone ID: LIB3229-025-P1-K1-G3
cccacgcgtccgtgtggttgcaatgttcgacttgccaggggattcagaagtaagtgccctagttctgaggttcggtggagagtgtgagctggtctggttgaatgacaagaatgctttagctattttcagtgatccagctaggtctgcatctgctcttaggtgcatggatcatggatattcttactatgaatgagaagcctaacatcagaacagtctatgacgacctaagttcgatatcgatgtgagagttttgtacatttgtttgatttttagcacttcccattttttttgtgggttttgttgctgggcacagctcgaagctggtattcagatttactcaactgattgaactagtgattgattgattgatt

SEQ ID NO: 1306 - DNA, 140 bp, Lilium asiatic
  Clone ID: LIB3229-025-P1-K1-G4
cccactcgtacgtgttaaaacaaagtatttacttgtcacataaatcagaaataattgcccgggtactaatttgatgtaatatgctttcaaccttctgttcttatttcataaaatccttaatataattatctgttacttat

SEQ ID NO: 1307 - DNA, 90 bp, Lilium asiatic
  Clone ID: LIB3229-025-P1-K1-G5
aaaaaaaaaaaaaaaaaaaaaaaaaaattttaataaaaaaaaaaaaaaaaaaaaaaaaaaaagagaaaaaaaaaaaaaaaaaaaaaaaaa

SEQ ID NO: 1308 - DNA, 306 bp, Lilium asiatic
  Clone ID: LIB3229-025-P1-K1-G6
aaattcgaaaaaaaaaaaaaactcaaaacggcggaaaaaaaaagcaacataaggagcgagaacataacaagaaatcagtctatcacaaaagcttaaactggtcgtaaaagtgatgaccaagaacatggaaaagcaaaaagccttaccaaacaaaaaaaaaaaactcagaataacccggaatctagcacccaattggctaagggagcaaatttcggggctgagccaacaaacaaaaaaatgagaatcgtaatagaaaagaaaaaaaaacctaatatatatggatcaaaaaaaggaagtataatgaag

SEQ ID NO: 1309 - DNA, 376 bp, Lilium asiatic
  Clone ID: LIB3229-025-P1-K1-G7
caggactcagatccagatgcaactattgtggagatcacttttggtgaccgtctgggatctcttctcgacactatgaatgcccttaagaatttaggtctgaatgtcgtcaaagctagtgtattcttggattcttcgggcaagcacaacaagttttctatcacaaaagcttcaactggtcgtaaagttgatgaccctgagttgttagaagcaatacgcttgacgattataaacaatctgctcgagtatcacccggagtctagcacccaattggctatgggagcaacttttggggctgagccaccaacccaaacgattgatgttgatattgcatcccgtgtaaatgtttatgatgatggcccttgacaggagcttactt

SEQ ID NO: 1310 - DNA, 368 bp, Lilium asiatic
  Clone ID: LIB3229-025-P1-K1-G8
aaaaagtgctggtgatatcatctcaagccagtcgggcgcagtcgatctcaccgattggggtccagctgtgcagcagagaagggcgagggacagattgtttcgatcgagacattgcaggactggaggaagctccgagggctatggatgagttgctcgctatatcgcttaggtgtattcttcctgtaaatgagaggcctaacatcagaacagtctatgacgacctaagttcgatatcgatgtgagagttttgtacatttgtttgatttttagcacttcccattttttttgtgggttttgttgctgggcacagctcgaagctggtattcagatttacttaactgattgaaactaggtttgatggatggatt

SEQ ID NO: 1311 - DNA, 256 bp, Lilium asiatic
  Clone ID: LIB3229-025-P1-K1-G9
aagaagcgggggtcaaataaagtgatggcagtcggacgaagccaacctaaccgtgagagttcaggtgtgtaactcagaaaggatacttacaaattgtttatgatcgagacattgaaataatgctggaagcgttttacgctatggatgactggttagctatatcgtttacgtgaattctttctacaaatgagatgcataacattaaaacaatttatgatgacctatgttcgatataaatggtgagagttatgtgcat

SEQ ID NO: 1312 - DNA, 251 bp, Lilium asiatic
  Clone ID: LIB3229-025-P1-K1-H1
ttttgttggggttttttttttattttgttatctatatttatttatttgtctttttttttcatcgttgtgactggcaaaaccccgaacttccaagctaaatcacccagcaccacattcactttagccagatgtcgtaagccaaatgaggcccccaccgttcgttttttacaacatatgcgcagccacaatgttgaaagacacgcgcccaagtacggccccaattagcgcggagggcgtgggggttgcgctca

SEQ ID NO: 1313 - DNA, 353 bp, Lilium asiatic
  Clone ID: LIB3229-025-P1-K1-H10
ggctggcctccagttccctgttggccgcattactcgttttctgaagaagggccgctatgctaagcgcgttggctctggagctcctgtctatcttgctgccgtccttgagtaccttgctgctgaggtgctggagctggcgggcaatgctgccaaggacaacaagaagtcccgaatcatcccgaggcacatctgccttgctgtcaggaacgatcaggagcttggcaagctgctcgccggagttaccatctcccatggcggtgtgatccccaacatcaacccggtcctgctccctaagaaggctgctgagaaggctgattctgctgcaaccaaatctcccaagaagacccccaagt

SEQ ID NO: 1314 - DNA, 410 bp, Lilium asiatic
  unsure (1)..(410): unsure at all n locations
  Clone ID: LIB3229-025-P1-K1-H11
gcacgacccacgcgtncggcgaaggggctgagatcggcggagctccagcgatcaatccatgggcaactgcaggttccatcattaccaaggggtggccagggccctgccaactccttgggatgaacacccgaagattttccgtttgaagctgtgggctacgaatgaagttcgagcgaaatccaagttttggtatttcttgaggaagctgaagaaggtgaaaaagagcaatgggcaagtccttgcgatcaatgagatctttgagaagtatccaacaaagatcaagaactatggcatctggctgaggtaccagagcaggactgggtaccacaatatgtacaaggagtaccgagacaccacactcaatggtggtgtcgagcagatgtacaccgaaatggcgtcacgccaccgtg

SEQ ID NO: 1315 - DNA, 299 bp, Lilium asiatic
  Clone ID: LIB3229-025-P1-K1-H3
atttcggagagatttttcctatttcagttatgagttggtttaattatatttttactctaccttgatggttgtggatctgtaacaagtttttgtcaaaccttttgctagcaggtgaccatatatatggttttatcaaaaaaaaaatacaaaaaataaaaaaaaaaaaaaaaataaaaacataaataagaatataaaaagatagattcataattaaaaaaaccacagaaaattcactcaaggccccattcaaagagggcccatgaggccaagcagaatgagaggcactaaggtttacggaa

SEQ ID NO: 1316 - DNA, 397 bp, Lilium asiatic
  Clone ID: LIB3229-025-P1-K1-H4
atcacacacgacacaaccccactcaaccggcagggaggccctcttcgtcggcggaggccatggtttccctcaagccgcagaagaggctcgccgcgggagtcctaaaatgtggcaaggggaaggtgtggctcgaccccaacgaggtctacgagatctcgatggccaactcgcgtcagaacattcgtaagctggtgaaggatggattcataattaagaagccacagaaaatccactcaaggtcccgggcaaggagggcccatgaggccaagcagaaggggaggcactcgggttacggtaagcgcaggggtaccagggaggctaggctccccaccaaaatcctttggatgcgcaggatgcgtgtcctcaggcgtctgctgcgcaagtaccgtgaagcaaa

SEQ ID NO: 1317 - DNA, 409 bp, Lilium asiatic
  Clone ID: LIB3229-025-P1-K1-H5
aggcgtacgcgctccgcgagatttttgcttgcacaagcaagcagctggtatcacataaagatggtatgctttgattgttcttatatagatgtaatttgttttcaagttcctgtacttatgggtcaaaattgtagatataattgtctgtgagttggcattttttacagtattaagtattgcttgctgggaaaatacgcatgtgtaaatcttggaggatgtggagtgctcttgaattgacctccgtgtctccagttgaatgaatatttggtttgatgcatttagtttacccgaactgaggtacttgagattatatctcactcacatgacgactaaaattggaccctgtaattatatctcactcacatgacgactaaaattggaccctgtaatattctataagtatgttttg

SEQ ID NO: 1318 - DNA, 384 bp, Lilium asiatic
  Clone ID: LIB3229-025-P1-K1-H6
gcagtgggagaggcagaggatgaggcggaggatagcccctggatgcagcctaattgaggtgggtgatggggttcatgagttctctgccggagacaggaggaacctcaagaagagggagatcaaagcagttctggatggcatggtgtgtaactttgaggctccagtgtcttcaaacatgggtattgggttgaataccgatgagtatcagttgtcatgaccgtgccactagttggaggttccttgattatcattcaggtaagtttgtgaattctttctttcagtgtctttatatagtaggtgctctatcaaatgcttgagagggtaggaatttagttcatttgtgtagacgtggatggagctaattgtacagaaatggtgttactt

SEQ ID NO: 1319 - DNA, 388 bp, Lilium asiatic
  Clone ID: LIB3229-025-P1-K1-H8
ccgaaaatggcccccaaaagagtgctggaagtccgacgaggcgatccgaaccctcagaggtggcgcctctcactcggagaggatgctttcgatgcgttcatcagcggcggaggagatgatgctcgcggggttttccgggagggctcgctgttcagcccactgctattcgggaagttcttcgacccagccgatgcatttccgttatgggaatttgagtcggagattttagattcaaaagggtttgttgattggtcggaaacggaggccgagtatctactaagagctgaattaccgggtggtgctaagaaatgtgaagttgagatatgtggtgataagggaaagatgctagatatcagtgggcaatggaggggccgagaatccgattcca

SEQ ID NO: 1320 - DNA, 387 bp, Lilium asiatic
  Clone ID: LIB3229-025-P1-K1-H9
gcagtgggagaggcagaggatgaggcggaggagagcccctggatgcagcctaattgaggtgggtgatggggttcatgagttctctgccggagacaggaggaacctcaagaagagggagatcaaagcagttctggatggcatggtgtgtaactttgaggctccagtgtcttcaaacatgggtattgggttgaataccgatgagtatcagttgtcatgaccgtgccactagttggaggttccttgattatcattcaggtaagtttgtgaattctttctttcagtgtctttatatagtaggtgctctatcaaatgcttgagagggtaggaatttagttcatttgtgtagacgtggatggagctaattgtacagaaatggtgttacttaaa

SEQ ID NO: 1321 - DNA, 147 bp, Lilium asiatic
  Clone ID: LIB3229-026-P1-K1-A1
cacggagataaaggcttgggggccattacaaaaaaaaggccctgagaggacaaagatgaaaaaggggcggccggtctaaaggatccaagcttacaggcgcaaccgtgcgacgctataactattctatagagtcgcctaaacgcaata

SEQ ID NO: 1322 - DNA, 371 bp, Lilium asiatic
  unsure (1)..(371): unsure at all n locations
  Clone ID: LIB3229-026-P1-K1-A10
gtgaataatacgttgagaccacctgtgccgccctcatgcgatcctgaatggaagcggcttatggaacagtgttgggcaccggaccctgtgcagcgtccaaccttcacccaaataactagcaggtttcgtgcaatgtcggtggcccttcagagtaaactagccaagtgatggtaaacaaatattatagttcatgaatgttattttgaactgattattcatattctatattgggagatgtgtgtatttgtgtaatatgtatttgtccaacaagccaactatacttgtctggttttcgtactcatgtgttgtattgaagttgcgggacattgtaattaaattcagactggtgaaaattttcagtgtnnaanaaa

SEQ ID NO: 1323 - DNA, 250 bp, Lilium asiatic
  Clone ID: LIB3229-026-P1-K1-A11
ccttccgccgctctttggatctagatgtttgtgagcctgtgatgcaagaagatatttgctactcttgatgggaaatccatttgatgatctattatccaccaagatctctgaggctttacttcaattgctatatctttgattttgttttccttttattttataggctgtgtgttgggaatatatttgttgtatgaatccaaaatatatgttttcagttaatacattgaagtttcttaaaatatattaaaaa

SEQ ID NO: 1324 - DNA, 53 bp, Lilium asiatic
  Clone ID: LIB3229-026-P1-K1-A4
atctgtaaaccctattttgtgcttctaatgtatatggagaattttattatctg

SEQ ID NO: 1325 - DNA, 411 bp, Lilium asiatic
  Clone ID: LIB3229-026-P1-K1-A5
cagatacagaaagagaagcttttgaaatactgttgaaagaagatgattattatacaattagagtatcatctaatgtggtaaacccctctggaaaagattacgttgtttcatcagtcaaagctaggtgtcttccccgggagcgtttggatgagcattttattattcacatggatggtgtcaatattttgtccgtgaactatggttctgctggggcatgtgaatatccacggatgatgaaacttccagccaaatgggagtttaattcgtacacagttctgaagaatagtgagcaggcaccaagaactccaatatttaccgaagaactagtggcaggggagatagtggagggtgaaggtgtaaaaccacctgagaggtcattctgggctaaatattggatgtatatgatccctc

SEQ ID NO: 1326 - DNA, 413 bp, Lilium asiatic
  Clone ID: LIB3229-026-P1-K1-A6
ggggattatggggtaccggactgttgagcctgggattatggggtctcttgatttgaggaagaaggtgcgagagcccaaggaggagaatgtcacgctcggtccgaccccgaaagatggtgagcatgcgttcggtgtagctcacatcttcgcgtcgtttaacgataccttcatccatgtcactgatttgtctggaagggaaactcttgtacgcatcacggagaccaaataaatagttttagatactgtttctgtttccgtggggtgctgcattttgtgttagaggaggcattgaacgggagcatgaagccatgcagtatttggagaaaagggaatgtgagtatgacctgaaaatatttgtggacttctacagggaggggaatgatttggagccagctgtgacaggagtcttagtg

SEQ ID NO: 1327 - DNA, 207 bp, Lilium asiatic
  Clone ID: LIB3229-026-P1-K1-A7
cccacgcgtccgcccacgcgtccggtgattgttctactactcctaaagtcgtgttaattctagtggcttggcatacattatatacttgtatgactcaaatgcttgaaggctacatagaataaacacgactttaggagtagtagaacaatcacaggccgcgtctgcgcgcgcgtagtcgctcagcgtagatcagacccgagatccgcg

SEQ ID NO: 1328 - DNA, 411 bp, Lilium asiatic
  Clone ID: LIB3229-026-P1-K1-A8
gaaggttctccgtcaagaaagaaatacagtctgtttcattgagtttaatgatgtaaatagtgctgtggctgttcatcagaatttgcagggtgcagtccttcctagttctgatcatggtggcatccgaatacaattttcgaagaacccttttggacagaggaaggactcggtcaatggtgctacgcataaagtcaacggagctcttacatatcagcagtagcttgaaggggggagtttgctctctctgttcttaaaatagaaagatgccatgctgttgcatcacacatcccaagacatctagtgcataattgcttgtgtgaatgcacctggtgatcatgagtgccattaacatcatgcatgatgcggaattacattttgctgttacttaagagtggattagcattctcacca

SEQ ID NO: 1329 - DNA, 399 bp, Lilium asiatic
  Clone ID: LIB3229-026-P1-K1-A9
gttttctcgcggcggaggcggaggggacagccgaactcgaacaatcatggctaggggtttgaagaagcatctcaagaggctcaatgccccgaagcattggatgcttgataagcttggcggtgcatttgctcccaagccgtcatctggtccccacaaagcaagggagtgtttgcctcttatccttattctccgaaataagttgaagtatgctcttacctaccgtgaagttcaatcaattctcatgcagcgacatgtcatggttgatggtaaagtccggaccgacaagacctaccctgccggcttcatggatgtcgtctctattccgaagacaaatgagaactaccgcctcctctttgacaccaagggtcgcttccgtctccactctataaaggatgagga

SEQ ID NO: 1330 - DNA, 412 bp, Lilium asiatic
  Clone ID: LIB3229-026-P1-K1-B10
cggacgcgtgggcaactattaccgcaacatccttgacaacaaggggctcttgctggtcgaccaccagctcgcctatgataagcgcactcgcccatatgtgctgaaaatggcgaagagccaggagtacttcttcaaggagttcagcaggggcattaagattctcactgagaataaccccttgaccggtgacaagggagagatcaggctgcagtgcaacgtggctaacaagaggcactagatagtgttggtgctgagaggagtgtgtgtggtggccctcctatggatggggacggtgctgtggatgttgttgctgccgcttttcctttgtttttgtttcggtgttatcggtgcctagctaggattgtgggtgatgaagatgtattatctatgaaaggaggatgttgtaggtggt

SEQ ID NO: 1331 - DNA, 282 bp, Lilium asiatic
  Clone ID: LIB3229-026-P1-K1-B11
tgaagctggacaaggatcgcaaggcgttactggaccggaaagcgaaggggcgtgctgctgataaggcgaagggtaagttctcagctgatgaggtggctgctgctgctggctctccgtcgctgcaagaggtcgattagtcgattgacttattgaggttattttgttatcaattagaactttctgttaagttttgattttgttgggaatcttgaattgtggctgtttttcttgtttttaagactgctatgttatcaaaatgctgtcttttggttttgagagtaa

SEQ ID NO: 1332 - DNA, 200 bp, Lilium asiatic
  Clone ID: LIB3229-026-P1-K1-B12
gttatgttattatcatactagaaaaagtttatactcctatagcggagagagtattttagtacattgatgagtagaggtcaacttaatcttgaagggggatataactattatggagatataatatcataattaaataggtagagatcattagttggcggtgagaaaaaagatattttttgaagcaagctattaatttttag

SEQ ID NO: 1333 - DNA, 411 bp, Lilium asiatic
  Clone ID: LIB3229-026-P1-K1-B2
cccacgcgtccgcaaggatccccactccccacttgtgcacttgagcgcatatgcgctcgagtgcaaaattgagaaaccttagctcgtctgggcgcttgagtgcccattggtgcgctcaagcgcattggctggaacccgaacattcggatgccttatagaaagttcaaaagtcaaaccatagagtctttaccggaaggcaagatgacaaagtgaacctttagatgaaagagacaagagaagtattaaagacatgataatatgatgtacacggacccatgtacacccaagtgataagaggatatgtgcattatctagcgttcattgataatcgctcaaaatttgtgcaaatctgtccaatgaggtgaaagttagggttgtttaacgagttcaaagtatttaaggtcaatgtct

SEQ ID NO: 1334 - DNA, 393 bp, Lilium asiatic
  Clone ID: LIB3229-026-P1-K1-B4
cccacacgtccgcccacgcgtccgagattcacaagatgtgacacagaagacaacattaacctagattcacagttggagttcttggccagctaccttgctgaattaagcttgctagactatggttgtgttcggttcttgccatcattggttgctgcttctgctgtttttctagcgaagttcactattgatccaaatacttatccatggagcttgagaatgcagctggagtcagggtatagaccttctgagctgaagaattgcatctgtgccatccatgatttgcagctaagcagaaaagggtcctctttcacggcaatcagagaaaagtacaagcagcacaagtttaagtctgtctcgatgatgctttccctcaccaagatccctgctccatac

SEQ ID NO: 1335 - DNA, 413 bp, Lilium asiatic
  Clone ID: LIB3229-026-P1-K1-B5
atctcccacctgagaacctgcatcaatctcagctcatcagcgatgtcggcgcgtggcacgggcggaaaggggctcggaaagggcggggcgaagcgtcaccgcaaggtcctccgcgacaacatccagggcatcaccaagccggccatccgccgcctcgcccgccgcggcggtgtgaagcgcatcagcggcctcatctatgaggagacccgcggggtgctgaagatcttcttggagaatgtcatccgtgacgccgtcacctacaccgagcacgcccgccggaagacggtcaccgccatggacgtcgtctacgcactcaagcgccagggacgcaccctctatggcttcggagggtaatctatctagggtttcggtggatgaactagaaatcaatactgtctcctcttatcttaaga

SEQ ID NO: 1336 - DNA, 409 bp, Lilium asiatic
  unsure (1)..(409): unsure at all n locations
  Clone ID: LIB3229-026-P1-K1-B6
gtttgccctcacctcgatcaagggaattgggcgccgtttcgccaacatcgtgtgcaagaaggccgatgttgacatgacgaagagggctggtgagatctcagctgctgagctggaaaatctgatgacgattgtggcgaatccgcggcagtttaagatcccagactggtttttgaataggaagaaggattataaggacgggaggtactctcaagtggtgtcgaatgcgctggacatgaagctgagggatgatctggagcgcttgaagaagattaggaaccaccgtggtctgcgtcactactggggtctccgtgttcgcggacagcacaccaagacgactggcaggcggngtaagactgttggtgtctcaaagaagcgatgagctctgttgtttttcatggctctggttttg

SEQ ID NO: 1337 - DNA, 412 bp, Lilium asiatic
  Clone ID: LIB3229-026-P1-K1-B7
cggcgaaggcgaactctcggcaaagatgcagatcttcgtgaaaaccctaacggggaagacgatcactctcgaggtcgagagcagcgacaccatcgacaacgttaagaccaagatccaggacaaggaagggatcccgccggaccagcagcgcctgatcttcgccggcaagcagctcgaggatggccgaaccctagcagattacaacatccagaaagagtcgacattgcatctggtgctgaggttgaggggagggatcatcgagccctcgttgatggcgcttgcgaggaagtacaatcaggagaagatgatttgcaggaagtgctatgccaggcttcatcccagggcagtgaactgccgtaagaagaagtgtggccacagcaaccagttgaggccaaagaaaaagattaagtag

SEQ ID NO: 1338 - DNA, 236 bp, Lilium asiatic
  Clone ID: LIB3229-026-P1-K1-B8
accgcgcgtgcgcgtgctcaaagtgttggtttttatctgtgtcagcaatagattttgcatgggaagtgtgttgtgccagttatgggaactctcctttatcctgtccgaaccatttttattacttgtgtgacatgagttgattattgtttgctgagttatgtgccctttctaccctcataagtggatgtatccaattccaactgctgctattgttgatagtcgttattgttttaaaa

SEQ ID NO: 1339 - DNA, 409 bp, Lilium asiatic
  Clone ID: LIB3229-026-P1-K1-B9
gggagcaacgatggctgtcccagtcggtccccgcactctcctcctcaccctcgtcgtgacggcgctcctctcctccgcgtattcgttggatttcgagtactgcaataagagggcgcactacccggtcaaggtgaaggggatcgagatctcgccgctgccgatcaaacgaggcgtgcctgtgagcttcagtatttccgcatctgctggggagtccatatccaaggggaaactagttattgatgttgcgtactggataattcatgttcacgaggaaacagatgacgtttgcacaaagacatcttgcccgattgcaacaggggatttcgtgatatcccatcagcagacactaccatccctcactccaccgggttcgtacacgcttacaatgaagttgttgggtgaagatggc

SEQ ID NO: 1340 - DNA, 95 bp, Lilium asiatic
  Clone ID: LIB3229-026-P1-K1-C10
tttagagcgcgagcgtccgctctagacgatactcgctgacgtacgcttgcttgccgcgctatacctactctatagtgttactctaaatgtactat

SEQ ID NO: 1341 - DNA, 374 bp, Lilium asiatic
  Clone ID: LIB3229-026-P1-K1-C12
ggaggattctgcatgaactggttctagaacctttaagagaagaatactattatgagataagggagcctttctccataatgtctctactaaagagtccaatgggattgatgatgggtttcatgcttatcatggtgttccttatgccgaaattaatggagaatatggatcctgaagaaatgaagcgagcccaagaagagatgaggaaccagggagttccttccctaaccagcttgttacctgggaggagcaattaaaaatgtggtcgccgtttgcttccaacttgtccgactcctatattgcctagtttttcttttcaggttgctgtatcaaagaattcagttatataagccaatagaatagtggttgtgactaaa

SEQ ID NO: 1342 - DNA, 120 bp, Lilium asiatic
  Clone ID: LIB3229-026-P1-K1-C2
catgtgataggttaaggattttttttttctctcaatggaatctgcggtattttgtaataattaatatagctggaaatgtattggcgggtttgttaattatccgtggttgtgtttttctgg

SEQ ID NO: 1343 - DNA, 414 bp, Lilium asiatic
  Clone ID: LIB3229-026-P1-K1-C3
aatctcgcaacccctctctcgccggcggcgaagcgaagaagatgatcatcccggtccgctgcttcacctgtggaaaggtgatcggtaacaaatgggacacgtatctcgatctcctccaagcggattacactgagggggatgctctggatgcgttaggcctggttcgctactgctgcaggcgaatgctcatgactcatgttgaccttattgagaagcttctgaactacaacacccttgagaaaacggaggcgatgatgagttgaggggcaatggagatcccatatactgaagtttgttatggcaggttgttagctatccatttagtgtcaactgttttgtggtgtgaagacattataatgaaacttctggtggcttgtgggtcagaatgtatgtgaactttaatctcatcagtta

SEQ ID NO: 1344 - DNA, 416 bp, Lilium asiatic
  Clone ID: LIB3229-026-P1-K1-C4
ctccgccgcctctgccgccgccgccgctcataaatggggtggatcggggaaagcatggagtccctccgctccctttagatccgtcaggttctgtcacagatcatcagtctagccttgatcatgacctcggctttgatcatatggaagggactgatgtgcgtcatcgggagtgagtcgccggtggtggtcgtgctctccggaagcatggagcctggatttcagagaggggatatcctgtttctacacatgagcaaggaaccgatccgaaccggtgaaatcgtcgtgtttcatcttgatgtaagagaactgaatttcttatgtgtgaaaattttaaatgtaattttatggttaatgttaatattttgacatgcttttatctataatatttattattgtaagtttaatggtatttttta

SEQ ID NO: 1345 - DNA, 408 bp, Lilium asiatic
  Clone ID: LIB3229-026-P1-K1-C6
gtagctttctcttctttggtaacgatgtcttcttgctgtggtggaaagtgtggctgcgggtcttcctgcaagtgtggcagtggatgcaatggatgtggtatgtatcctgacttggctgaggggagcactgcctctaccactatgatcatggggtttgctcctgccaagggggagtttgaggggtttgagatgtatgctgagaatggtggctgtggctgcaagtgtggtgataactgcaactgcaacccctgcaagtgtggcaagtgatctctccatggagaagaggatgtagggtttgataccctttgtttacttgtttctgctgtagtgctgaataatggccatgggtttatatgatgcaagtctttttgcaccatgagtggttgttcaccagtggcttagtgtctt

SEQ ID NO: 1346 - DNA, 412 bp, Lilium asiatic
  Clone ID: LIB3229-026-P1-K1-C8
gaacaggaggaggaaacaattaagaaaaagtatggtggaattgtacccaagaaaccaccactcatatccaaggatcatgagcgtgccttctttgattcagctgattgggctttagggaaacaaggtgctccagttgagaaggaaaaagaatctcttgaggcccttcggccaaaactgcagcctacgcctcagcagcaagtgcgtgtacgacgatcatcttatgcatctctagatacagaagaatttgcgaatgtttcttctgaggacgcaagcaacaatgaatgacctctcaactttgtatgtgttggagaacaattcttgaaggcagaacttatgatttcgtgagcagaaggcggtgaggcgatctcgtaatgtctactgaataaagatgagtgatgcaagtggcggattt

SEQ ID NO: 1347 - DNA, 416 bp, Lilium asiatic
  Clone ID: LIB3229-026-P1-K1-D11
ccactacagcaatcgagcaatgtcaggacgaggcaagggtgggaaggggctgggcaagggcggtgctaagcgccaccgcaaggtgctccgtgacaacattcagggcatcaccaagccggcgatccgccgtctcgctcggcgcggcggcgtgaagaggatcagcggcctcatctacgaggagacccgcggggtgctgaagatctttctcgagaatgtcatccgcgatgctgtgacctacaccgagcacgcccgccggaagacggtgacggcgatggatgtggtctatgcgctcaagaggcagggaaggacactctacggcttcggcggctaaagggatgaggttaggtctagtctagggctagggtttctgctttagtttactagttattggttgtctttggagaatggtagtgttt

SEQ ID NO: 1348 - DNA, 252 bp, Lilium asiatic
  Clone ID: LIB3229-026-P1-K1-D12
cggacgcgtgggtgtggaaattattgccaatgaccagggaaaccgtatcaccccatcgtgggtgtcttttactgataacgaaagacttattggtgaggccgcaaagaatctggcggctgcaaatgccgaaagaaccatctttgatgttaagagactcatcggaagaaaatacgatgacaaggaggtccagaaggacatcaaactgttcccatacaagattgtgaacaaggatggtaagccgtacatacaggt

SEQ ID NO: 1349 - DNA, 366 bp, Lilium asiatic
  Clone ID: LIB3229-026-P1-K1-D2
gggggaaaaaaaaaaaaaaaaaaaaaaaaaaaaaaaaaaaaaaggaaaaaaaagggggggaaaaaaaggaaaaaaaaaaaaaaaaaaaaaaaaaaaaaaaaaagaagaaaagaaaaaaaggaaaaaaagaagaaaaaaaaaaaaaaaaaaaaaaaaaaaaaaaagaaaagaaagaaaaaaaaaaaaagaaaaaaaaaaaaaaaaaagaaaaaaaaaaaaaaaaaaaaaaaaaaaaaaagagggaaaaaaagaaaacaaaaaaaggaaaaaaaagaggaaaaaagaaaagaaaacagaagaaaaaagaagaaaaagaaaaaaaaaaaagaaaaaagagaaaaaagaaacaaaaaaaaagaaagaaag

SEQ ID NO: 1350 - DNA, 413 bp, Lilium asiatic
  Clone ID: LIB3229-026-P1-K1-D3
ccgacaatccccatttgccgcataatcatgagcaagatcaagttgtgtacagtggaacccatgataatgatactatcctaggttggtggggaagtctgaatcaggaggagaagagtagtgtagagaaatatctttgtacatccgaggaaactgatatctcatggacactgatccgtgcagctgcctcgtcagttgcacgaacagttgtcatacccatgcaggacatccttggtctgggtacttctgctaggatgaatacaccagcaactcagcttggtaactggcgctggagactgtctcaaaacctcagctttgacagtctagagcctgaatcacagaaattgaggaatattctcaaattatacaacagactgtgaagctggggtaagattctgagtgcaactcaataatga

SEQ ID NO: 1351 - DNA, 179 bp, Lilium asiatic
  Clone ID: LIB3229-026-P1-K1-D6
cagtgtcttctctgaaagacgagactcaagtttgaataggtcgattatgaagctttttgatgcgggatgttcttgtcccaggcatctctttatgtcgaagttaatagtgcaatttaagttgtcacatttcccaactagaatttgcatatcgttgaaacttgtggatttatgtttttggt

SEQ ID NO: 1352 - DNA, 377 bp, Lilium asiatic
  Clone ID: LIB3229-026-P1-K1-D7
ccgccgcctgaggcaagagagatccagcgagagatctgagctcggtcgcccgaagatgagggcgaagtggaagaagaagaggatgaggaggctgaagaggaagcgccgaaagatgaggcagcgatctaagtagatcctgatgcagtggccttcatcaagtggaagatagttgattggtctttcatcttgctgttggtttctctgttaatgtctggccttaaaatgcttaggcatctaaatttcctgttttgcagctttagtatgtcctaagacttcaaatgttatgctttttgttgactatgtgtgagacaatggtgttgaaccatatttgatctcttttgagatgtttaatgttgaagggtagttatttctagatt

SEQ ID NO: 1353 - DNA, 409 bp, Lilium asiatic
  Clone ID: LIB3229-026-P1-K1-D9
gatggttcggttattgcatgcgctgccctcttccctttctttgaagacaagtgtgctgaagtagctgctattgctgtgtctccagaatgccgagggcatggacaaggtgacaaattgctagattatgtagagaagaaggcatcatccttggggttagagaaactgtttttgcttacaactcgtacatcggactggtttgtgaggcgtggtttcgtagagtgctctatcgagtccattccaatggaacggagaagaaaaatcaacctctcacgcggttcaaaatattacatgaaaggattacaaccagagccatctggagtcgcaattgagaggcctacgagcaggccagtgcaggtgtgatagagctcagtgcagtggtaaacacttatttatatgagataaggcttga

SEQ ID NO: 1354 - DNA, 124 bp, Lilium asiatic
  Clone ID: LIB3229-026-P1-K1-E11
gaggacagtcttgttttggatcatgtttccagatttttaagtttttggcgtactagtgttttaagtatttgcagacttgcatccaatttcaactgagactcaatgtgctgtttttgttcttctc

SEQ ID NO: 1355 - DNA, 416 bp, Lilium asiatic
  Clone ID: LIB3229-026-P1-K1-E12
tgaaaccatactttctgatccgcagatatctgaggcaattgcgcatgaaaaggaggttactaaatcaatagaaatctataatgttgaccgtgctgtttgtggccgcatagctggtgtgattgcaaaaaagtatggagacacaggatttgctgggcagattaatttagtattttccggaagtgctgggcagtcctttgcctgtttcctgactcctggaatgaacattcgactggtgggagaagccaatgactatgttgggaagggcatggctggtggagagcttgttgttacccctcctgagaatactgccttttgcccagaagatgctactatagtaggtaacacctgcttatatggtgcaaccggaggtcaagtgttcgttagaggcaaagctggagaacgttttgcggttagaa

SEQ ID NO: 1356 - DNA, 359 bp, Lilium asiatic
  Clone ID: LIB3229-026-P1-K1-E2
gcagttctcaacatcgtcctctcagattccccaggatggcgaagtcgaagaatcacactgcccacaaccaatcctacaaggcccacagaaacgggatcaagaagccccgcaagcatcgccacagctccaccaaggggatggaccctaagtttctgaggaaccagaggtatgcgaggaagcacaacaagaacaatggagggtctggatctgaggagcaggaatagttgatcgatcaatcgagctggttttgttaacttttgctcaagagctgtttatttgactggaatatttcatgttttgtttcgagttatgatgaattgtgatgatattgttagttaatcttggattttaatatggtg

SEQ ID NO: 1357 - DNA, 420 bp, Lilium asiatic
  Clone ID: LIB3229-026-P1-K1-E4
cccacgcgtccggggcgatagaagatgccaaaaaggctggcaaggttcctgatgttttctattgtcttaaactcttggaagcgaccggcatttcgactgttccaggatcgggttttggccagaaggacggagttttccatctaagaacaaccatcctgccagcggaggaagaaatgcccgagatcatggcaagtttcaagaaattcaatgacagttttatggaacaatatgaaggtcacagcggtcattcgaggatgtaagcaagcgataagtgtaatcgaagttaccgaatgtggaagaatatatatagagaaaggaatgctcatacattttactagggtttccttggagatgtaaaaaaattgttactccagaagaatacctattcgtcaaatggtggaatttgtgataagatattgt

SEQ ID NO: 1358 - DNA, 418 bp, Lilium asiatic
  Clone ID: LIB3229-026-P1-K1-E5
aaaaaaggctcccatactgcgactccataccctaaacaggttggaaagaatgcttccaacaatgagaagtctaagcagcaagctcctaagccaagtactccgaaatctggtggtgctgtgacctgcaaatcctgcagcaggacattcaactcggaaaatgctctgcaggctcattcgaaggctaagcatgaagctaagtagttgtggacgaagggatttattgaattttgagtttaggaattatctagtggtctttggttactgttaagaggcttttctttctggtagacttttgtttgcatgaccaatgttgtgtttcatggtgctttgtgggcaactagttcatcctctggacaagtttgtgggcaactagttcatcctctggacaagttttggcgtagttgaatgggttttatct

SEQ ID NO: 1359 - DNA, 420 bp, Lilium asiatic
  Clone ID: LIB3229-026-P1-K1-E6
agcccactgatgccatgagatgcgtagagaggttgtacttgatgcgtaagggaccttataggcacaacaaaagatgcgcaaaatgggtgctcacttgcggatccttgactggtgagtcaaggggtggttgtcaacatccctagaatcaattactattccttcgagagtctcttgccgctgtagacaaatagcaaagggacttgttattggcaggcagcagattgatagccatgtgtgacttgaggcgtcagtgtgcctgaatcggatggtgcgtcgcaaagtgttgtgttatgtgatgataatcgttcatcaatgatcaccacgaaagccaaagaaaccaagggtatctattttattttagggttatttttagtcatagtttgttgaatcgtccacgaccacgttgcgatagccatgatg

SEQ ID NO: 1360 - DNA, 298 bp, Lilium asiatic
  Clone ID: LIB3229-026-P1-K1-E7
tcgtttcatgaggcagagaaatacatgtctgaggatgaagagcacaagaagaagggggggtcgaagaatgctttggataactactcttacaacatgtggaacaccattaaggttgacaagattgcatccaaactccctgctgaggacaaaaagaagattgaggatgccattgaggcggtgtttcagtgtcttgacaacaaccatcttgcggtggcaggtaagttcgatgtcatgatttaggagcttgtgagtatttgcaattcgatcattgctaatatgtattatggtattggggggg

SEQ ID NO: 1361 - DNA, 410 bp, Lilium asiatic
  Clone ID: LIB3229-026-P1-K1-E8
cccacgcgtccgcaccattcgaagcaaatccgcaatcggcgatgtcgggtcgaggcaaggttgggaagggtctgggcaagggcggcgccaagcgccatcgcaagatcctgcgggacaacatccagggcatcaccaagccggcaatccgccgcctcgctcgccgcggtggcgtgaagaggatcagcggtctcatctacgaggagacccgtggggtgctgaagatctttctggagaacatcatccgcgatgctgtgacctacactgagtacgcccggcggaagacggtgactgcgatggatgtggtgtatgcgctgaagaggcaggggcgtaccctgtacggcttcggcggctgaggggattggtcttctgcaagctttagttgaatgttaatctggtaggacttctgttat

SEQ ID NO: 1362 - DNA, 389 bp, Lilium asiatic
  Clone ID: LIB3229-026-P1-K1-F12
ggaaggaagcctgattctgtgcaggcaggttgatcagcctggaatgatcgggcaagttgggagcatcttgggtgagcagaatgtaaatgtgagcttcatgagcgttggcagaattgctcctcggaaacatgctgttatggctattggtgtagatgaagaacccagtaaagaagctctcgatagtatcggtcaaattccagccatcgaagagtttgttttcctcaaactctagattttagtatgtgagatgaagtcatggtaccaaggtcattgatattatggaattggaaacctttcttgataatttgtagtaggtgttagttcggagtttcggatttctttgatgttgaatcgtagttgtggtcggctttttctttgtttggaaaaca

SEQ ID NO: 1363 - DNA, 413 bp, Lilium asiatic
  Clone ID: LIB3229-026-P1-K1-F2
cccacgcgtccggccgaaaatatgaaaactcctcctcaagctaccgtccgcagattggaatctgtggagtcagtaactgaccagatacatagcctctctattactccgacagttgaggttccaggcccttccaaagattcaagagagagttcaatgcctggggattctggtccagatcttgagaagagaatccgtgctctaaaaaagaagattcggctcgcagatgcgcaagtcaaaggtgagcaacaacatacgaaggcggagcagacggagaagatggcaagagtggatgggtggcgtgaggagctgaaacttttggaagacggaaaggcgaagatgctctcttgattctttgcatcaattctctctcggtcccactcagattgtgatgtgataatttaatgtcgaagttt

SEQ ID NO: 1364 - DNA, 419 bp, Lilium asiatic
  Clone ID: LIB3229-026-P1-K1-F5
gcgatgcatcaagtgctagctacttcctagcaggcgcggcaatcaccggtggcactgtcactgtggaaggttgcgggacgagcagtctgcagggtgacgtaaactttgcccaagttcttgagaaaatgggagcaaaggttacatggacagagaacagtgttaccgtcacgggtccgcaacaagatccttcaaagaagaaccgactgcgagcagttgatgtcaacatgaacaaaatgcccgatgttgccatgactcttgctgttgtcgcattgtttgctgacgggccaacagccatcagagatgtggcttcatggagagtcaaggagaccgagaggatgatagccgtctgcacggagctcagaaagctgggtgccacagtcgaagaagggcctgattactgtgtgatcaccccacccgag

SEQ ID NO: 1365 - DNA, 420 bp, Lilium asiatic
  Clone ID: LIB3229-026-P1-K1-F6
tgttcctccgatcaccggcgacggtgccaagcccagctcctgcaacggttccatcgcttcgtgccagcttgaggacgagtttctgatggactctgacactcaccggcggttcctccagcaaggtgggcacatcagctacggtgccctggaaccagacaagccggtgtgcgactccggcagaggcaaaccctacgttggcaactgcgtgccggcacggtccggcaacccttccagccggggctgcagcccctatgaccgatgccgggtcggctgaggctgttcaaattgcaaggtgggaaaaagctgaagctgatccgtatcatttctcttgcatattcaacttgtctttctctttgaatgggcttaagaatgttcagttttatttgatcaggcagaagaactctgcctctcttattcatc

SEQ ID NO: 1366 - DNA, 409 bp, Lilium asiatic
  Clone ID: LIB3229-026-P1-K1-F7
cccacgcgtccgcggacgcgtgggatcggagcttccatcatgtcgaagcgagggcgtggaggatcggcggggaacaagttccgtatgtcgctaggtctgccggtggcggcgacggtgaactgcgccgacaacaccggggcgaagaacctgtacatcatctcggtgaaggggatcaagggccggctcaatcgcctcccttcggcttgcgttggggacatggtgatggcgactgtgaagaagggaaagccggatctgcgtaagaaggttatgccggctgtcatcgtgaggcagcgcaagccgtggcgccgaaaggacggggtctacatgtactttgaagataatgctggagtgattgtgaatccaaagggtgaaatgaaaggttctgccatcactgggcccattggaaaag

SEQ ID NO: 1367 - DNA, 292 bp, Lilium asiatic
  Clone ID: LIB3229-026-P1-K1-F8
tgcttgctgaggagattcaagagcgtgacgaaggagccttaaagttcctgaaggacattaaatggtgtaaaattgaggaaccaaagggtttcaagcttgaattttttttcgatccaaatccctttttcaagaatcttgttctgacaaagacgtaccacatgattgatgaagacgatcccgttctagagaaagcaatagggactgaaatagattggtatccgggcaagtgtctgacccagaaggttttggtaaagaagccaagaaagggatcaaagaacacaaagcccatcac

SEQ ID NO: 1368 - DNA, 410 bp, Lilium asiatic
  Clone ID: LIB3229-026-P1-K1-F9
cccacgcgtccgctttcttatccagcaagggattcttatgtagaaccactcaggcctgttgcacagtatcacctaccggctcctgttccgtatggtacttatggacctcctgaggactattattacagtgctgagccccgtgagcctgtagaatatcgtgatccctatctgtaccgagtgcctgcgccctaccctgcttcattccgcgatgccggttacccctcaagcgggtcttatgctcctccgcctcagtatcgctactaagatcaggatttagcagaatcagataactctgttactttgagctttagttgtgttactttttaatttctgtcttctgcactagctacctagaatcgtatgacttgtctctgtggaactgcatcaacatttgtcaaaccaggtattgg

SEQ ID NO: 1369 - DNA, 381 bp, Lilium asiatic
  Clone ID: LIB3229-026-P1-K1-G1
gtagctttacatattataaatggaacctttattatcaataggaggttgtcccctgtcccggggccataatatattaccaaattcatgtgagcttggaatgacatgaatatttatttctggtggcaatgtttgtgagcttggaatggcgtcccaaagcacccactttagtcttcttggaagaggacggcaaatcggtgttatggctgtcatgcgattgggcttccgatatggggaacggctttcaatctcaaggagcaatgtggtatcaaccagggtctttggtgttctgaagcatgaaatggatgttggcatgacccttttcttattcctggcattgggacaatactgcctacttgaggcatgtaattccagattggctta

SEQ ID NO: 1370 - DNA, 337 bp, Lilium asiatic
  Clone ID: LIB3229-026-P1-K1-G10
gtgaatggggccttccggctttccaagatgtcgcaaattaaaccaagccaaatttcctagttctctggtattcttgcagtggagcagcaatacgtcaaattatatttcgtaaagacgcccagttatactgattcggcaaaagaattttggacttattaatctgattttatgggacgtcgtcaaagctacttgtttggatttgattgttgcaagtattaattcctctacagagaagggatggcctcgttgaaaataacctctattgtggttaaatttgctgtacttatttacattttacactcaatgccctggttctaatattgattagcacatgtgg

SEQ ID NO: 1371 - DNA, 418 bp, Lilium asiatic
  Clone ID: LIB3229-026-P1-K1-G11
ctccgctgccgtggtatcggagcactattccccagatggcaatggcgggatttctgcccttcagtgccatttatattgaactttactacatatttgccagtgtctggggccacaggatctacactatttacagcattctctttatcgtctttatcattctcctaatcgtcaccgccttcatcactgtggcgctgacctactttcaacttgctgcagaagatcacgggtggtggtggaggtcgttcctttgtggtggttctactggtttattcatttatggatattgcttgtactactatcatgcccgatcagacatgtccggcttcatgcaaacatccttcttcttcgggtatatggcctgcgtatgctatgccttcttcctcatgctcgggtctgtgggtttccgtgctgctttgct

SEQ ID NO: 1372 - DNA, 266 bp, Lilium asiatic
  Clone ID: LIB3229-026-P1-K1-G2
tggaaattcatggatcttcggagcagatgaaggcagcacaaagtcttgttcagagtttcgtgtctgttggacagaatgcacaacttgcacctcgcatgtactgattttccgaatctgtttgtcattgagttttaaacagacaagtcagttgtgtttgttatgacagtagtaattagtagttttgaaccagcaagaactgctagtacttgttattcttcaggagttgtctgttgatgaagtttaggagtagaccttctatattttga

SEQ ID NO: 1373 - DNA, 414 bp, Lilium asiatic
  Clone ID: LIB3229-026-P1-K1-G3
gggaacacaattatagtacactggtacaggcgaaagagcaatttacaccatgtctgggatgacatgatcattgatactgcactgaagaagttctacaacttggatctttcagagatgataaaagacattgaggcagattttctggaagactggaatactgatgtttcatcatggggggattgtgaatttaacgagacagtttgtccgaatccttatgcttcagagagtatcagcctagcctgcaagttcgcatacaaaaatgccacgccaggcagcactctaggagatgagtacttcctcacacgcctgtccattgtcaagaagagacttgcgcaaggcggagttcggctggctgcggcgctcaataggatttttggtgtcaccccacctgttatggtctctgcagcataagca

SEQ ID NO: 1374 - DNA, 346 bp, Lilium asiatic
  Clone ID: LIB3229-026-P1-K1-G4
gtttcaacagttacgaggactgtaacctctaaacagaaataattcgtagaggaactttgtaagatataggaaacttttataactagctggtggattgtgttcttctatttccaggttaagtgttgggaccgttagttttatgaggataatcatgattgactcgtccacccttatttcaatcacttgatgaaggttgtctgtggctaatgtgaatagcttctggttctgttctaaagaacctactgcttatgaaatatgttgtatttttcttttgatattgatattgacatttaatttattgttttatattggttttgttagacatctagaagctatatagtgttta

SEQ ID NO: 1375 - DNA, 83 bp, Lilium asiatic
  Clone ID: LIB3229-026-P1-K1-G7
gggggggcgagactatccaagagttacatacacttgtatgcgacgtcataattcttttatagtgacacctaaatttaatataa

SEQ ID NO: 1376 - DNA, 365 bp, Lilium asiatic
  Clone ID: LIB3229-026-P1-K1-G8
cccacgcatccggagcgtgcggtcaaagatattgaacgaggcgtacgcctgcgacaaggaccttgccaagaagatctggtgctttggccctaaaacaacgggccctaatatgcatggggatatctgtaagggcgttcaggacctcaatgaaattaaggatgcagttgaggctggtttccaatggtcctggaaagagggagccctagctgcagagaatatgcgagggatatggctcgaggtgtgtgatgaagggctcgatgcttatgccatccacagaagaggtggtcaggttatggcaactggtagaagagccatttatgtctcacaggcgatagcgaaacctacgctggttgaaccagcttact

SEQ ID NO: 1377 - DNA, 389 bp, Lilium asiatic
  Clone ID: LIB3229-026-P1-K1-H10
cggacgcgtgggttctggagttcgagactatgatgttgaaaagttccagcttcgtaatcatttccgtttggagtgggcagttaaccatacatcgattagttcagatcggaaacttgtcactgctgtcggagatagcctcgagggactactgacggatgctaatactgtaaagactgcacaggatctacacggtcatttggatttctcgttcgcatcagcggggagccctgatggccatacgttcgccactgcgaaccaggacaagacgtgtactatttgggatgtccgtgacctattcaaatcagtggcatgtcctgagaggcaaccttggagccatacgatcaattcggtgctctattgatcgtacgttcatgcagatggccgagcct

SEQ ID NO: 1378 - DNA, 374 bp, Lilium asiatic
  Clone ID: LIB3229-026-P1-K1-H11
ggaggatgcccatatgcgaaaggtgcttctggcaatgtcgccactgaggatgttgtctatatgctccacgggttgggcataaagaccaatgtcgatctcgggaagctcctggctgctggagatttcatctgcaagcatctcggacgccagtcggggtcaaaggctgccattgctctgagcagaaccactgcagaggcctcgaagctttagtgcacttgtagatccttgttctagttactacttgctttagttaagtaaatagatttgaagttatgtatgtatacatgataactgaaataagatactgatgctactgtgggttggccttatgtatgtataaacagattcctactaaactcgcatatttgggaatt

SEQ ID NO: 1379 - DNA, 423 bp, Lilium asiatic
  Clone ID: LIB3229-026-P1-K1-H12
ccatgcacaagcatgggatgatgctctaagcaaggcgaggtttgagtttagatggttggaccagtttgctttgtcgttggaccctatgactgccatggcttttcacgatgaatctcttccatcagagggtgccaaggtggcccatttctgctctatgtgtggtcccaagttttgttctatgaaaataactgaagatgtgaggaagtatgctgaggagcatgggtacgggagtgcagaagaggttgtgcaagacggaatggatgctatgagtgcggcgtttttggctgccaagaaaactgtcagtggagaacagcatggtgaagttgggggtgaaatctatgtgccagagagttatgttaagcgccaataaaggaactcttggatttcttcgctggttgaagcttaatggagcttgatgttgag

SEQ ID NO: 1380 - DNA, 210 bp, Lilium asiatic
  Clone ID: LIB3229-026-P1-K1-H2
gaaccccgggtccccacctccgatgagccaatgactttcaggaacatggttggagaggctggggttttaataggattacccattactttttactatttggcatgttgcatttattgtgatgggtaagcttaaatggtctgaacttgagtatggttgcttgtttgttatctttttattttctacctattttgagtatttaagtgaatctat

SEQ ID NO: 1381 - DNA, 505 bp, Lilium asiatic
  unsure (1)..(505): unsure at all n locations
  Clone ID: LIB3229-026-P1-K1-H6
cgaatcggccgggtccgacccacgcctaccgcgggcccctactcgggaccccactttcgctccgccaaggggttttcatctgttggttgagccgatcgtgttgccttaatcattctctttatgtcgacacccatggtgttnngcccgcccannacattttctnngccccatcctaacatggnngcaatatggnnatttcaaatgccctccgggaaggatacccagatagcgcgaagtctggtgcttggtgagtacctgtcagtacaacactcacaccagtttggcctaagcacataataatcgcggacctcgacactacgtcttttactacatatgatacaagcctctgcgtttgaatgctagtacgcttagaggggcaatacccaaactagttcatacgccaacaatgcatctcatcacctatcgcttcctgtgcaaggacaaggacgaagtctaccatatctttgatgatggagggtagtggattccacccacgcgatgatcg

SEQ ID NO: 1382 - DNA, 354 bp, Lilium asiatic
  Clone ID: LIB3229-026-P1-K1-H7
cgatgagccaatgactcctggtcagtgcaacatggttgtggagaggctcggtgattatctctatgatcagggattttaggtccattttactcgtttttgtgtctacctttggcatgggtttgcatcttatctgttgatgtggttgaaatgctttgaaatggtccttggaaacttgtaggtagtgtgttggcatggtgtcttgttggactctggatttctctcctgtggtttcaaggtgtttgagtatttgaagtggaatctagtttggccctttgattattttattttgagtttttgttgttgttggaatctcttattggaaggtgtgcatgcaaaatgatcctgttctgattg

SEQ ID NO: 1383 - DNA, 409 bp, Lilium asiatic
  Clone ID: LIB3229-026-P1-K1-H8
gagcaatcagcggcgcacacacagagttgatcgtcgccggcgtgatgtcgtacctgctgccgcatcttcactccggctgggccgtcgatcaggcgatcctcgccgaggaggagcgcctcgtcgtcatccgcttcggccacgactgggacgaaacttgcatgcagatggatgaggtgctagctgctgttgcagagacgataaagaactttgcggtgatatacctggtggacattacggaggtgcctgacttcaacacgatgtatgagctgtatgacccttctactgtgatgttcttcttccgcaacaaacatatcatgatcgacctgggcactggtaataataacaagatcaactgggcgctcaaggataagcaggaattcatcgatatcatagagacagtctacagggg

SEQ ID NO: 1384 - DNA, 389 bp, Lilium asiatic
  unsure (1)..(389): unsure at all n locations
  Clone ID: LIB3229-026-P1-K1-H9
gaagaaagagaagccccgttcttaaatcttacttaccatgatattatcctgaatgtctgtcccggtaggaacttgtttcttttgatatctttttctgtgattttgttgtgtaagaatcctggatttcaattattaagtcttctacctcagtatttactattcaaccatttttatttttatttttaaaaaaaaaaaaaaaaaaaaaaaaaaaaaaaaaaaaaaaaaaaaaaaaaaaaaaaaaaaaaaaaaaaaaaaaaaaaaaaaaaaaaaaaaaaaaacccccaaaaaaaaaaaaaaaaaaaaaaanaggggggccccttttaaaagaacaaaattttaatcccggggtttgggaggtaaaatttttttttttggggccccaaaaataa

SEQ ID NO: 1385 - DNA, 363 bp, Lilium asiatic
  Clone ID: LIB3229-027-P1-K1-A11
cccacgcgtccgcccacgcgtccggttcaggatatatctatccagtcgcgccatgcaaggggtgtgattctgatgaggctagagcatgctgggaaaatccagtcagcttctttgatatctgcagcaacacctgaccttgatgtagaagaggaagccgaagaaacggttcatgcataaaagcgtgttgattcattgttacgtttctttttggttactgaggaatgaggcttatcagtttgggttccgtggttgaactgactcttcatctgagtgaccgctacggcttctggaagcaattttggtccacacctggtatagttttgtaaaatggggagagggaggagcttaaatatttgtttactg

SEQ ID NO: 1386 - DNA, 412 bp, Lilium asiatic
  Clone ID: LIB3229-027-P1-K1-A12
cccacgcgtccgccacgcgtccgcggacgcgtgggttgaaactgcgagaataaatggaatacttgggaatatcgatgccaacactggtgatccccaagttggctgggacactgatcagtttctcacggatcttggagaggcaactttggttatgctaagtgtggtcaggaatggtggacttgctccaggtggcttcaactttgatgcgaagctgcggagagagagcactgatgtcgaagacttgttcattgctcacatttctggaatggacaccctggcccgcggactacgaaatgctgccaaagttgattgaggatggttctctcgctgagcttgtgcggaagcgctacgaaagttttgattcggaatttggggctctgatcgaggccggtaaggctgattttgagactct

SEQ ID NO: 1387 - DNA, 250 bp, Lilium asiatic
  Clone ID: LIB3229-027-P1-K1-A2
atagttctataattggtatcaattatctagggacttgttttattctggttgttacttctagttctaagaagaatgtcgtctttatgtggtttcagcagtacaatgttcgtcttttcagttactttttccttgctgtctgtgttatttatgtgagctgtatactcaagcatgttatggcttttgtttggttagaacttgattgttttgatctcctggtctaaaatatatagtagaaacatttacttttaaa

SEQ ID NO: 1388 - DNA, 419 bp, Lilium asiatic
  Clone ID: LIB3229-027-P1-K1-A3
cggacgcgtgggcgttgcgatgatgaagacgggaacggattggagaaaagcttcacgacactactcgagagggagatttaacagtctgagcatcaggctcgtgaaggatggttcggtaaacttggccagtgagtgaggcggtggcttgatttgtgcattaacatccttttgccccctgattattttgggttttcattagcccggtttgattggcctgctatgtaaccacgatctggtgtctggctgatggggtgcaatgtctaagcttcttgtatgcatccatgtgatgcttctgctgctggtggtggtttccaaacagtttcttttgtgaaatgttgtatattattgtttcattgtgttatctaatgtactaacagaatgtgaattacctttgtttcaagccactggaggattaattt

SEQ ID NO: 1389 - DNA, 251 bp, Lilium asiatic
  Clone ID: LIB3229-027-P1-K1-A5
aggaggaaagatggtgctaaggtccaggtgggcttccccttgttctttgtcattttcatcgcacttgttagtttggcacttggatacctgttgcatccatgacgaatcctggcccgcgaatgagatagacgtgtttatcttgtttttgtttcagacttgatatatcaaactcatgcttgtaaattagaataccattacctttatatagaagcacttttaaggtagtatatggttttcccttgatttatatt

SEQ ID NO: 1390 - DNA, 252 bp, Lilium asiatic
  Clone ID: LIB3229-027-P1-K1-A7
cccacgcgtccggccgagagctatggctgattccccttcaatccctcgcccgcagccggaatccatgtcgaagagttcattcaagctggagcatcctctcggtttgtgaatcggcccgatctgattatgttaatgtcgatttttcatgatatgatgtgtttttattcgattcgttaatatttgtgtgagattcatttgatacttgagagatctgcattatttggggggaaattacaagatcggttatatttt

SEQ ID NO: 1391 - DNA, 238 bp, Lilium asiatic
  Clone ID: LIB3229-027-P1-K1-A8
gccactctatcattggagagatatctatgacgaccgttcaatcccatgggccgcagagcggtatatcatgtgcagagaggtcattcacgctttatgcatcgctctcggtttgtgaatcggcacagatctgattatccgaatgacactgcttcatgctatgatgtgtgattatgggatgtgtgacgctttgtgtgagattcatttgatacttgcgagatctgcatgacttgaggggaaa

SEQ ID NO: 1392 - DNA, 375 bp, Lilium asiatic
  Clone ID: LIB3229-027-P1-K1-A9
gcgcctccaacgtcgtaagcccccttctccttcaatctcttggaaccctagatctgatcgccgggtcagcttctaccaattctgaatcaacgagagtgaagatggggctgtctttcaccaagctgttcagccggctttttgccaagaaggagatgcggattcttatggtgggtctcgatgcagctggtaagactacaatcttgtataagctgaagctgggagagatcgtcactaccatccctactatcggatttaatgtggagactggggaatacaaaaacatcagcttcaccgtgtgggaatgtttgaggtcagggacaagaattcgacccgctttggaggcattactttcagaacacccaaggccttatcttt

SEQ ID NO: 1393 - DNA, 231 bp, Lilium asiatic
  Clone ID: LIB3229-027-P1-K1-B10
cctacgcgttcgtggacgcgtgtactgacgcgtagatcgtacataaataggggggggtgcaagttggacgtgtttgaatatgtacatacatataatttctagtatgacttttaatgcaacttgtgttgttagaattatatatatgtatacagatatttaaaatttgtccttagattttaagactatatacctgttttttatttggtacataataataaaaaaatggttgtt

SEQ ID NO: 1394 - DNA, 356 bp, Lilium asiatic
  Clone ID: LIB3229-027-P1-K1-B11
gtcccgatggatcaacccaaggctgcacttgagatgctgacgcggtggacacagggcaaactagccgaacccacatcagaatctattgctggagttgcatctgaatcaagggatatggttgctgatatttaataacttagtgttagagcaatgatacggcactttcccgtctgaatgatttcgtagcgggtagcatgataattatatttagttataccttactgatttttgtatattaacaatgtaatattgcctgtctgcccggatgaaaacttaggactatgtgccagagatgtttttctgctaccttttgccgggatactttcctttgatggagattattatatttgtactct

SEQ ID NO: 1395 - DNA, 396 bp, Lilium asiatic
  Clone ID: LIB3229-027-P1-K1-B12
gataaacttgaattcagcaaaatattggaggcaatcaaggccaacttcaatgacaaatttgatgagatccggaagaaatggggaggtggtgtcatgggatcaaagtctcaggccaaaacaaaggccaaagaaaggctccttcagaaggaaattgcccagaggatgacctaggcttattcacttttgtgttttggtagtggatgggctaggctaggctaggcggcttctcttccctttagttttaccttaccccgttgcattgtgctgagagtagtgaactaaatacttttaatctgtgaaatgaatgcttgatgatttaagctatgttatggtctccttcagactattgaaggattatggttttgatatacctgattagctcaggtatgttctatc

SEQ ID NO: 1396 - DNA, 425 bp, Lilium asiatic
  Clone ID: LIB3229-027-P1-K1-B2
aacatgcactgtttcactgcaaagactgcttgtgtagtgcttgatgtgctcggcccaccttactccgatcctgatggaaggcactgccaatactacagagctttcccatgctcaagttctggtgatgcggcgtctgttccaggcgatggtgagtatgcctggttggaagagaaaccccaaaacttccgattccgtctagtagaatatgatggtccgaaagtcgtagaacaatgaagcatctcactgcgatgacgctgcatccgcagcaaagcgaaggactctgcaatttagaatgtagatactgatggaaagaagggagagaagctcagtatgtgcgagcacctatcgataaaacttgtttcttagtcgacctagcaagaatttcaccgggacatgttaccatagtttgtagaccttgagaaaac

SEQ ID NO: 1397 - DNA, 425 bp, Lilium asiatic
  Clone ID: LIB3229-027-P1-K1-B3
aagatccctgttagtagcgaacgctggcgactgccgagcagttctttcacggctcggcatggcagttgagatgtccaaggatcacaggcctgaatgcatcaaggagagaaagcgcgttgaatcccttggtgggtacatcgatgatggctacttaaacggacagctaggtgtgacccgagctcttggtgactggcaccttgaagggatgaaagagatggaccatcaccttggcggacccttgagcgctgaaccggagctaaagatgataacgctgacaaaagaggacgagttcctgataataggtagcgacgggatgtgggatgttttctcgaaccaaaatgcagtcggcttcgcccgaaggcgacttcaagaacacaatgatgtgaagctgtgctgcaaggagttggtggaggaggcgcttcgac

SEQ ID NO: 1398 - DNA, 381 bp, Lilium asiatic
  Clone ID: LIB3229-027-P1-K1-B4
accacttcgacggcgagtcacaggtcaaagacttcattcagacattactcctctatggcggctacaacgagatggctgacattctggtgaatttaacctccctagcaaccgagatggggcggctggtgtcggaggggtacttgttaaccgtcctggcgccgcacgatgatgcgatggcaaggctgacggcggatcagctgagcgagcctggtgcgccggagcagataatgtactaccatttgattccggagtaccagactgaggagagcatgtacaatgctgtgaggcgatttggaaaggttcagtatgagacgctgaggattccgcagaaggtggtggcaaaagaggctgatgggtctgtgaagttcgggcagggggagg

SEQ ID NO: 1399 - DNA, 299 bp, Lilium asiatic
  unsure (1)..(299): unsure at all n locations
  Clone ID: LIB3229-027-P1-K1-B5
cccacgcgtccgcccacgcgtncggacccgcggggtgctgaagatctttctggagaacgtcatccgtgatgcagtgacctacactgagcacgcccgccgcaagacggtgactgcgatggatgtggtgtatgcgctcaagaggcaggggcgaactctgtatggcttcggcggctgaaggtcgaggtggctttagtagatgttagtgtcagtagtagttttagatggacttgggctcagtttcttgtaatttgtcagatttcttatctgatatggaaatttaaaaagtttgtttgagtaaa

SEQ ID NO: 1400 - DNA, 410 bp, Lilium asiatic
  Clone ID: LIB3229-027-P1-K1-B6
aaaagcttcatcaaggtacatctatctactctcttgtcccctttatgtcttatttggattgttatgtgtaggattttggaaaagcttggatttgtgtggcaaaatgaggaaaggatcaaagctcaagaaggaaaagagatgttgcaagcttgatgaggatgtgctctcggatctataagtacccctcctcccccattggattgaggtaagaggtctcacttcggcccgagtgggggagggcacattgttggccgtctttctctcggttttggaggaggcacattgggagagcatctacaagtaatttcggagtggagagttcatcatggttcttggttgtgggtctttgttgagctttgagagggtcatgtaagtggagtttgtaaggtttgagtcttattttatgatga

SEQ ID NO: 1401 - DNA, 118 bp, Lilium asiatic
  Clone ID: LIB3229-027-P1-K1-B8
acgacaagaggttgtgagcgcagctgactgtcacgccttcattgactatactggcgttgatcctgataatcgctatcggcaccgacaataaatccgaccttgcccgaaatgctgttaa

SEQ ID NO: 1402 - DNA, 205 bp, Lilium asiatic
  Clone ID: LIB3229-027-P1-K1-B9
cccacgcgtccgcccacgcgtccgctcatagggagtctctgcaccaataagttctttccaagttgatcttgtttgtctctgcagctacattttattcctagtatgacctttattgcaacttgtgttgctagcattatcaacatgtaatcagttatttaaaatttggacttagatccaagactatttaccgttattcccttggtac

SEQ ID NO: 1403 - DNA, 221 bp, Lilium asiatic
  Clone ID: LIB3229-027-P1-K1-C10
gcaggccttccaagccagctacagtcatggagagcaacggatttggcaggactatttcgaagaagtcgattgacatggctctccggcacatggacattccacagagtatgtgccggtctcgaggggcatccctctttccacagagcattcgcgctccttcaataaaagaccggcccgctcgcttgtcaggccctatggtccacataccctgtgatgagaag

SEQ ID NO: 1404 - DNA, 349 bp, Lilium asiatic
  Clone ID: LIB3229-027-P1-K1-C11
cccacgcgtccgttaacttggagggcgatacttttaagggaaacaatactgatctacgaccaccaatgttctttgtctttactgtatgccttaattaagccttaaactctcgttgaagacgtataagaaaacaacagcatatctataaggcacttctatctcgtcttttgtgctaaagtgtctaaaatgactaaacctattatctttgtatctttcgtaattgagattgggtgggtgttcagcagcatcttaattcaacgaaaagaggatggatgccccggcgataaaatttcttaatcaaaatgtgaaggaaatagcttttttttaacaggtaaacctgagccttacc

SEQ ID NO: 1405 - DNA, 153 bp, Lilium asiatic
  Clone ID: LIB3229-027-P1-K1-C12
cccacgcgtacgttaacatggagggcgatactttaaagggaaacaatactgaggggggaccaccaatgtaatttgtatctactgaaagcatgaataaatcctaaaactatggttgaatacaaggattaaaacaacagaagatatataaagcac

SEQ ID NO: 1406 - DNA, 420 bp, Lilium asiatic
  Clone ID: LIB3229-027-P1-K1-C3
ccgagcacagcacttatccggaggttgcgtatctgctgatgtatgggaatctgccgtcaaagagccagctggtggattgggagtttgccatttcgcagcattctgctgtcccgcagggccttctggatattatacaagcgatgccgcacgatgcccatccgatgggtatggttgttagtgcgttgagtgcgctgtcagtgtttcatccggatgccaatcccgccctcctgggtctagatctttaccagtcaaagcaagtgagagataagcaaattgctcgtgtaattgggaagataccgacaattgcagcagcagcttatttgagaatggctggaagacctccggtgctcccttccaacaatctttcttattcagaaaatttcttgtatatgttggactctttgggcgacaggacctaca

SEQ ID NO: 1407 - DNA, 345 bp, Lilium asiatic
  Clone ID: LIB3229-027-P1-K1-C4
cgcatcttcttgtgcgagtgaatagtgtctcggtgcagagggggtttatgctggtggcgctgttggtgtcgtactgggctgtgagcaaggtcatttatctggataattggaagaccgggtatagcatccatgccttctggccgtctagctggctctgatggccgacaggcccttcagagctatttctttgaggaaatacagctgccaagagctactacaattaacttaggttgtctctatgtaaggttggaacctgaaatttgcaatttgcgtgtcattttgtattttggacaaagatcctgtcatttatgcattttttttttggatagattttcaattgaagta

SEQ ID NO: 1408 - DNA, 343 bp, Lilium asiatic
  unsure (1)..(343): unsure at all n locations
  Clone ID: LIB3229-027-P1-K1-C5
ctgaatactcagtcccagataagatccccaattccagagatgatactagtggcggtagtggcagagctgctggaggagtacacggtgctggtggcgcgggtgctggagcagctcctccgtgacgcgccgttcccccgccggatgcgcttccttatgctgcggagcatccctttcgccaccgtcgctcccccaccctttcccgtcccaatccccgccgtctgagtcaccggattctgccgcccggatcatgtatatgagcgttgtcgtcaattttgtgtttcaggttttgcacacttcttgttatgtctttcttagtgttggtttgattaatatgcggcattna

SEQ ID NO: 1409 - DNA, 307 bp, Lilium asiatic
  unsure (1)..(307): unsure at all n locations
  Clone ID: LIB3229-027-P1-K1-C6
aaaaaaaaaaaaaaaaaaaaaaaaaaaaaaaaaaaaaaaaaaaaaaaaaaaaaaaaaaaaaaaaaaaaaaataaaaaaaaaaaaaaaaaaaaaaaaaaaaaaaaaaaaaaaaaaaaaaaaaaaaaaaaaaaaaaaaaaaaaaaaaaaaaaaaaaaaaaggggggggcctttttaggggttcaagtttttttaccggttttttgcaagtttaaattttttttttggggcccccaaaataaatttcngtgcccggtttttaaaaactttttgttgggaaaacctttgtgtttccccaattttttttttt

SEQ ID NO: 1410 - DNA, 381 bp, Lilium asiatic
  Clone ID: LIB3229-027-P1-K1-C7
gtgagatgctgcttggagcatgctgcatctgttgcaagaacatttctcacatcagatgtggtggtggttgatatcaaggagcccgagcctgcccctgctgttaacccgatggacaactcagggtatggctactaagtgaatacggaaataaatccgagggagctttatgttgaggaccatccttggtagaggagggtcaacctttttgtataatctaatctagatgtatttgacattgtttagtgaattaggtttggatctagattccgggagattctggtattttcaattcattgccatggttctgactgtgctctgttgtgtaatatgtttgcagaactttttgagattgttatttaagttctttagtattgaggtgat

SEQ ID NO: 1411 - DNA, 373 bp, Lilium asiatic
  Clone ID: LIB3229-027-P1-K1-D10
cctggattgccatacctctcacattgctgtcaagtttgctgagatcctgaccaagatcgacaggcgctctggtaaggaaatcgagaaggagcccaagtttttgaagaatggtgatgctggatttgtgaagatgattccgaccaagcctatggtggtggagactttctctgagtatcctccgcttgggcgttttgctgttagggacatgcgccagactgttgctgttggggttattaagagtgttgagaagaaggatcccactggtgccaaggtgaccaaagctgctatcaagaagaagtgaggtgttcttcaatttatgtctgagtttcttaagatctgcaagagtctagttggtaatgcttggttttggtta

SEQ ID NO: 1412 - DNA, 290 bp, Lilium asiatic
  Clone ID: LIB3229-027-P1-K1-D11
gccgaaagatgaggcagcgatccaagtagatcctgatgcagcggccttcatcatgtggaagatagtcgatggtcttacatcttgccggtctttcatcttgctgttggtttctctgttgatgtctagcatctaaatttcctgttttgcagctttagtaggttctaagactttaaatgttatgcttttgttgacaatgtgtgagacaatggtgttgaaccatatttgatctcttttgagatgtttaatgttgaagcgtagttatttctagattaatttagtcgattgtctta

SEQ ID NO: 1413 - DNA, 87 bp, Lilium asiatic
  unsure (1)..(87): unsure at all n locations
  Clone ID: LIB3229-027-P1-K1-D12
gccgaaaggagaggcagcgaaccaagcaganccggangcagcggcccggaggcgggggaagagaggcgacggacagacaacccgccg

SEQ ID NO: 1414 - DNA, 421 bp, Lilium asiatic
  Clone ID: LIB3229-027-P1-K1-D2
gttttgccctaatttcgcctcatcccaaccccattcgcgagatcggagatggcggaggagggagcagtgatccactgccacaccgtcgatcaatggactcaacagcttgagcaggccaatcagaacaagaagctggtggtgattgatttcactgcaacatggtgtggaccttgccgtatgattgcccccatctttgctgatctggctaagaagtatgtcaatgttattttcctcaaagtcgatgtcgatgaattgaagtcggtggccaaagattgggcgatagaagcaatgccgacctttattttcctgaaggagggaaccatcttggagaaagttgttggagcccacaaggatgagctgccgaagaagatcgaactgttcctgagcaagtagtgactcttcttgccttgcttaactctat

SEQ ID NO: 1415 - DNA, 210 bp, Lilium asiatic
  Clone ID: LIB3229-027-P1-K1-D3
cccacgcgtccggttgcttttatctttatctagtacgagtctttagtgactctgttccttttatacttgttacggttgtagaaaacagcagctgttggtcgaatattaaatcatggttatagttgtagatgtggcattgtaattcggaattttgtcttgtccatgcaatttctcttttagttccagtttataacttgttacagtacttgt

SEQ ID NO: 1416 - DNA, 387 bp, Lilium asiatic
  unsure (1)..(387): unsure at all n locations
  Clone ID: LIB3229-027-P1-K1-D4
cggacgcgtgggcggaactgatattccgatcgctccgtatctcggggcggcgctgaggcaggatgagggggcggggtttttggtgctgtatgtgaggctggatgggaaagttcggtggaaggtggggagctggacgtcgggtcattatcatatcgacgtcagctgcccggccttcttgagctttgatggtgggaagggtgggggtaatggttataatccgataattaggtttcagcagctatcaacttgtagtgttgacgtgtgaatcctacaactacggtggccagtgatgttgatggtgagtctgtgacattcttgtacaagctgngtattatggtgaaaataatagtaggtatatgagattcaaaaactagcgtacaagtttat

SEQ ID NO: 1417 - DNA, 413 bp, Lilium asiatic
  Clone ID: LIB3229-027-P1-K1-D5
aaagaacagaagatttgggctgagtaatatgttacaaagatggaactagtcttcatcttagaaaaattggaagcttgctgtttagaaattgatgaactgtgaaattttaggctcaattaccccaccacatccaagctccgacaccgtagagcttaagctgtgagagaatgcacctactatgagctatgaatataaaccttaacaatagtaatctcaggcggcaacgatggtaagggtcagacttagctcggaggaagtccccataactgcctaagccttgtttctgatgtgcatctctccgtgtcggtgtcctatccccattttcccatgtgttcctcccataccatccttgatttctcctccctccaaagtcatcgtctccattgatctcgacaacaaagatgcttgtgatc

SEQ ID NO: 1418 - DNA, 406 bp, Lilium asiatic
  Clone ID: LIB3229-027-P1-K1-D6
gtttgttgcagtttgacaagtgcctcatcaaaatcttcataatctaaagatccaaatcgctgacaaaggactgtagtgaactccttccactccagattcggccgattaattttgtaccattggagtgcctcgtcttgtagatagaaagaaaccagcagaacacgctccccgtcctcagtgtcttgatattggaaaaattgctagttccatcccgttggatcgtcttcggagaatcatgggaagtctaggcctgcaattcgagtttgcactcctcttgttcttacctccggctttggttttggcttaatagaaggctatgtctccttatttccgagttggttgatgatgatatccagtttcaaattaactgccaccacggactctcaaagttcacggatatcattct

SEQ ID NO: 1419 - DNA, 320 bp, Lilium asiatic
  Clone ID: LIB3229-027-P1-K1-D7
gtcgcgtcggcgttactcatcagccggccgccgccgctgccattcgatctgaaccttccagcgatcgacgaggaggatctccagtgcacggcgctccggctctgatccagaagcaaattcgtaattgatcctctctattctctctaatcatcaagaacttagataattgttgcgtgtttggtttatcgcatcgattgaaggaagagatcggttatgcagatctgcctctgtttttgttgtattttgatcttttaatcacgatccttttgtaaaaacgtgaaaaatctggagtaaaatctgaatccacatactactttttc

SEQ ID NO: 1420 - DNA, 416 bp, Lilium asiatic
  Clone ID: LIB3229-027-P1-K1-D8
aatcgagcagatactttggaccctgcacttcttcgtccgggaaggcttgataggaaaattgaattccccttgcctgatagacggcagaagaggctcgtttttcaggtctgtactgccaagatgaatctaagcgacgaagttgatctggaagactacgtctctcgacctgacaaaattagtgcagcggagatttctgccatatgtcaagaagcagggatgcatgctgtgaggaagaaccgatatgtgatccttccaaaggacttcgagaaaggatacagaacaaatgtgaagaagccggatactgacttcgacttctacaagtgacgagtctgcttgtggaaatttcactcttagtgtatgtcaaggctatttatttcaggagacagttataaactttgcttaggataactcatgta

SEQ ID NO: 1421 - DNA, 412 bp, Lilium asiatic
  Clone ID: LIB3229-027-P1-K1-D9
ggtctatattcatctcaacttaaagatgagcctctcttgcatcgaccaagccatggaaaagttagggaggcaacatacagagacccagcgccttcagtgttgggctatggaggcagtactgcttccagctcatactttgattcagctctaaattcatctattgatcgtccgactgagcggccccagatgaggtttgatccgttcactggccagccgtacaaatttgatcccttcacaggcgaagcaatacggccagaatcacacccacatccttcgagccgttactgatgcaattatttaattttactattggccatcggtggttctgagtgagtactgtctaaatatcatgtgaaatttagtttctagagtcctggttctgagagagtactatgtctaattatcatgtgaa

SEQ ID NO: 1422 - DNA, 420 bp, Lilium asiatic
  unsure (1)..(420): unsure at all n locations
  Clone ID: LIB3229-027-P1-K1-E1
cggacgcgtgggcggacgcgtgggcggacgcgtgggattttctgccccatccaacatgggcaatatggatttcaaatgctccgggaagatacagatagccaagtctggtctggtagtacctgtcgtacaacctcaaccagtttggcctaagcacataataatgcggactcgacgattgccttctactacattgattcaagcctctgctttgaatgctagatgctcagaggggcaaacccaaacagttcaacgccaacaatcatccatcaccatcgctcctgtgcaagggaaggagaagtcaccagatcttgatgatggaggtagtggattccccccacgcgatgatggtgacgggggtggaggtggtggaggtggaggaggcggttggtcgngagggttcttctttttcggcctactagc

SEQ ID NO: 1423 - DNA, 314 bp, Lilium asiatic
  Clone ID: LIB3229-027-P1-K1-E10
gagactctcgcccgtaagcacactgggcctggggttctgtccatggctaatgctgggcctaatactaacggatctcagtttttcatctgcactgccaagaccgcttggctggatggtaagcatgttgcgtctgcgcaggctgtggaggggttggatgccccgaactactacgcccatgtgtaccaggccagccccacgtacccaaatcctgctgaaagcagcccctgaaggctgcatccacttccctgctgtggcatgggtattgtataggatctattcatccttggcttaatttttgttgctattccctctta

SEQ ID NO: 1424 - DNA, 121 bp, Lilium asiatic
  Clone ID: LIB3229-027-P1-K1-E11
cccacgcgtccgttttgtaatttcactatcctaggttatatcaaacaaaaggatgcgatacttgctaacgagattctaatattcatcagcaatgtcaataatgtagaattatttgatagca

SEQ ID NO: 1425 - DNA, 323 bp, Lilium asiatic
  Clone ID: LIB3229-027-P1-K1-E2
cggacgcgtgggcggacgcgtgggcggacgcgtgggatcttctgccccatccaacatgggcaatttggatttcaaatgctcttggaagatacagatagccaagtctggcctggtagtacctgtcgtacaacctcaaccagtttggcctaagcacataataatgcggactcgtcgattgccttctactacattgattcaagcctatgctttgtatgctagatgctcagaggggcaatcccaaacagtttaacgtctacaatctttcatcaccattgttcctgcgcaaggaaaggagaagttatcagattttgatgaaggaggta

SEQ ID NO: 1426 - DNA, 415 bp, Lilium asiatic
  Clone ID: LIB3229-027-P1-K1-E3
gaggatagatcctcccggccatgctttatctttggatgatggaacagagtatttgggagggctgcttgcagatgatcaacagagagattgtttgacacggtggaattttaacaaatgaatcttgctttggatttggaggaactattttgaactcgaaccatggagatataggaatataggaatgagatatatgtatggcctttagaactcgaaccatggagatatagaaccatggagatataggaatgggaaatatgtatggccattagaactcgaaccatggagagatagaaccatggagatataggaatgggatatatgggggtaatatgaactcgaaccatggaagaattagaaatgggatatatggatgggcctgggactttgaagaaaaaagagccaggggaagtactag

SEQ ID NO: 1427 - DNA, 258 bp, Lilium asiatic
  Clone ID: LIB3229-027-P1-K1-E5
tcgtgcatctggttgatatctgtggtggattgactagcttagagggctaaaatttggcatgtgggttgtattttgggacaaattgattttttccagagcttggaggaggttgttttgggagacttgcgtactttttttattggtggagggtttaatgctagtcccgatatatttttattattataggatgttctgttggtttttctcattggatgactcttttatcagttcatttaatgcttgatcataatatttatt

SEQ ID NO: 1428 - DNA, 283 bp, Lilium asiatic
  Clone ID: LIB3229-027-P1-K1-E6
tttatcttctcaaaataaattgtagtattcaaatgttatgttgatctattttgcactactgaagaatttgatgaaggcatgcattagaagttgtggagggtccctgtatacgatttagctcaatatttttgccacatagtggtaatgttttgacagttaatgccctcttccccctttcccgtgctaatgaacataattttcatagaccttatacaaccctcacctttattgatgctatgatgattaaattaactgctgtaatctggatcattatgattgattt

SEQ ID NO: 1429 - DNA, 234 bp, Lilium asiatic
  Clone ID: LIB3229-027-P1-K1-E7
ccacgcgtccctaaaccaaaacatatatactttccactgaaagtacactgcctcaccagagggggaagaatagagttttaattactcattaaagaacaatgcactctataattgctacatgttccctatgtacgatctcaacctatttaggttcagatcataataatgctcacttcaactttgcataggtttacattgacatacgctctctaggtagaaaacataatgtacata

SEQ ID NO: 1430 - DNA, 390 bp, Lilium asiatic
  Clone ID: LIB3229-027-P1-K1-E8
acgaatatatacaaatcttaacttattaatgtacgttaaggtgcatgctgttatttgggaggattcaacaattgtgaagattactcaagctaccatcataggagcacaagaggtacaatctgtagatactgacctatgatgagaggatggttagtattgataagcgtatgaatgctctaaatgatgctaacaatgatgaagatgatgagtgtttgatgattgagcttttgttaaaccgtctattaattcttaatttgttttaagaatttaacttggtatttttgcggttttatgttatgatgtctgattgttgttgataaacattggttatgctcttttcttaagtacttttgaaaatttttactcatgctggcttaattaacttttata

SEQ ID NO: 1431 - DNA, 411 bp, Lilium asiatic
  Clone ID: LIB3229-027-P1-K1-E9
cggacgcgtggggtagttctctcaccttcgataacgatgtcttcttgctgtggtggaaagtttggctgcgggtcttcctgcaagtgtggcagtggatgcaatggatgtggtatgtatcctgacttggctgaggggagcactgcctctaccactatgatcatggggtttgctcctgctaagggggagtttgaggggtttgagatgtatgctgagaatggtggctgtggctgcaagtgtggtgataactgcaactgcaacccctgcaagtgtggcaagtgagctctccatgagaggaggatgtagggtttgataccctttgtttacttgtttctgttgtagtgctgaataatggccatggtttacatgatgcaagcttttttgcaccgtgagtggttcaccagtggcttctag

SEQ ID NO: 1432 - DNA, 409 bp, Lilium asiatic
  Clone ID: LIB3229-027-P1-K1-F1
ccacgcgtacgcaaatccctctttccctctttttcaactaaaatcttcaatggctgccaaggctgacaagaagccggtggcagataataagccggccgaggaggagaagaagtccgtccctgcggagaagaagcctgccgagaagaagcccaaggcagggaagaaggtcccggcctccaaggagggggcttctgacaagaagaagaagaggtcgaagaagtcagtggagacctacaagatctacatcttcaaggtgctgaagcaggtccatccggacatcggaatttccagcaaggccatggggatcatgaacagcttcatcaatgatctctttgagaagattgcacaggagtccgtccggcttgcccgttacaacatgaagaacactttctccttccgggagattcag

SEQ ID NO: 1433 - DNA, 184 bp, Lilium asiatic
  Clone ID: LIB3229-027-P1-K1-F5
ctactcttttcatctcatgtcatcaaaatttaatcttcatacttccttcttttataatatggttttttgcgttatgttctatgtcttgtaactattatttatttattattatttaatttttttaggtggttattattgtcatctttttttattgagtttttattattaaatttttatctattta

SEQ ID NO: 1434 - DNA, 221 bp, Lilium asiatic
  Clone ID: LIB3229-027-P1-K1-F7
cagggtactaatgatgtctttcaactcatacgcttagccaagcttgcaccgaggacggtcgaaggggaagcaagcctgtatcttctacccactagtcattcatgtacagggctagtcgccttttattctagaaatggctatctctgataaataactcatgcatcttttcatttaacagcgaggctgagaaaagagggactccgctctaggggatccaagct

SEQ ID NO: 1435 - DNA, 445 bp, Lilium asiatic
  Clone ID: LIB3229-027-P1-K1-F9
cgcctccggtaccggtccgcgatccggaattccgcggcgctacgccccacgctgagattgaagagaatggtgacgatatgcatgcagcggagtacttgattatatatggagcgcttcaatcaggaagcaatcgagccttcgtttttgaagtgacagagttcatggtagatgcatatgaacatgaactacagaaacctatactgttacacgtttcattaagtgcatccttagtcaaaataccatcgtcatgctgatcctgcttgacaaactatgacagaagtgatggggaggcatcaggtatgctgacacacgattcacctattggggtatcgcgtgaagagcctatatgctaaatgggttggatgatactatcaagcaaagcgattgagaccttgattgagaacaggcttgacagactttgtacggaagggttagatggaggagc

SEQ ID NO: 1436 - DNA, 417 bp, Lilium asiatic
  Clone ID: LIB3229-027-P1-K1-G1
ctgagattgaagagaatggtgacgatatgcatgcagtggagtccttgattattcatggagcccttcgttcaggaagcaatcgagcctccgtttttgaagtgacagagtccattgttgctgagtatgaacatgagctacagaaacctatattctcacacctctcggtggctctctccccgctgccaataccattgcccttcccatcgttcttcagaaacaatgtaggtcggtatggtgagttatcaggcccccctacacaagagtctcctctgaggggatcgcttgaagtcgattcagtcccaatggctgcgaggctccgatcaagcaaagcgattgtgcccttcattgagaagaggctgaacagccttcgcacgaaaggtatagtgagaggagcccctggcgctgagttgcttcgca

SEQ ID NO: 1437 - DNA, 214 bp, Lilium asiatic
  Clone ID: LIB3229-027-P1-K1-G2
cccacgcgtccgcgcgccgccgccgctgctcgtctccgccgttcgccgccgcatctgccaccatgggtcgcatgcacagccgcgggaaggggatctcctcctccgccctcccctacaagcgcactccgcccagctggctcaagatctccgcccaggaagttgacgagggccatttgtaggtcccaaaagaagggcctaaccctttccaaaatcg

SEQ ID NO: 1438 - DNA, 212 bp, Lilium asiatic
  Clone ID: LIB3229-027-P1-K1-G3
gtaacgaggttactctcctcctggttgttcgagctttcttttttctgttctgttgtggaaagcagcgatgctattctaagttgttatatttttgaatatgtaatatcaacgtaggtggattgtaaaataatgtaatattaataatataatttttagcacaaatatatgttgttgggagattttcgattttttttttcttatttctcttttga

SEQ ID NO: 1439 - DNA, 203 bp, Lilium asiatic
  Clone ID: LIB3229-027-P1-K1-G4
ttaacaaggttactatcctactcaatttcgagcatacttatatctgatcatatgtggagaggttagtatactattttaagttcgtataattcatgaatatgtaatatcaacttatgtggattttaaaataatgtaatattaataatataatttatagcacaaataatgtatatataagattatataaatgttataacatatat

SEQ ID NO: 1440 - DNA, 180 bp, Lilium asiatic
  Clone ID: LIB3229-027-P1-K1-G6
tctacaagatccaagctaacttacacctgcgaggcggggacatagctgatctatagtggcacctaaaatcaacaatattgcttgggcggcgttattacaacgtcccgactggaaaaacacccgtcgatcaccaaaatattctttttgaacatcatcctctttccagcatgtggtgaaatt

SEQ ID NO: 1441 - DNA, 400 bp, Lilium asiatic
  Clone ID: LIB3229-027-P1-K1-G8
ccgaagcagcatcaaatatccagagagcaaaatgcttatgaaggccccttcatccctcacctccttgaggagcatctctaaaccttctcggctgaagtcttcaaatggcttcagggcttctgcaatggctacctacaaggtgaagcttgttgggccagaaggggaggaacatgagtttgaggccccagatgacacatacattctggacgcagctgagcttgcagggttggagctgccatactcttgcagagctggggcttgctcaacctgtgctggtcacatggtgtcaggtgctgttgatcagtcggacggatcattcctcgacgagggacagatggaaaagggttatgttctgacttgtgtcgcctatccaactgctgattgtgtcattcacactcac

SEQ ID NO: 1442 - DNA, 413 bp, Lilium asiatic
  Clone ID: LIB3229-027-P1-K1-G9
gcgcaaccgatccaccggagaagatgcagaacgaggagggacagatgatggatctctacatcccgaggaagtgttccgcgacgaacaggctcatcaccgcgaaggatcatgcggcggtccagatcaacatcgggcatttggatgagagcggggtttacaccggccagttcactaccttcgccctttgcggcttcatccgtgctcagggtgatgctgatggtgctctggaccgtctttggcagaaaaagaaagtagaagctcgccagcagtaaaaagtagctgtagggcgttttgcagtggaagatctggttttagtttcaacatatgttactttgacctctactagttactctatgctttggttattttgtttgcctggttggacaagatgaaggctggcattcatgtttaac

SEQ ID NO: 1443 - DNA, 410 bp, Lilium asiatic
  Clone ID: LIB3229-027-P1-K1-H1
gagatttggaaatgataatgagaaaacactggctatgactgaaatgaatggtgagtattgctctagtagacccatgcgcattggtgctgcaaccccccgaaagtcatcaggggggtttggatccaacggtgcatctgcacagggttttcagtcggatggcgattcaagcaatacaacaatatttgttggtggacttgatcctaacgtcaatgaagaagaactcaagcagtccttttctaagtacggtgaggttagctctataaaaattccagttgggaaacaatgcggttttgtgcaatttaaccacaagaaataatgctgaagaagcactgcaggcattgaatggtaccgtcatcggcaagcaaactgttcgcctttcttggggtcgcaaccccgctaacaaacagtcg

SEQ ID NO: 1444 - DNA, 389 bp, Lilium asiatic
  Clone ID: LIB3229-027-P1-K1-H11
aattgggagaattcgtgcctactctaactttcgcaagacatgaaaaaaccgataataaatctcgtcgttaattttttcattttttttttaattattttttagaaattttaattaaaatcttatctttttattttataagtaaaattaggcagtttttattcatttagtggggataaccttatgataaatagaaagaactcgcgttgtagtacagaaattaaagctttagctcaacataaacatatatgtatgtcggttttcaaagcacgaagagtaattgatcagattcgtggacacttctatgaagaagcacttatgatactagaacttatgccttatcgagcatcttatcccattttgaaattaggtttttcccgggcagcaaatgc

SEQ ID NO: 1445 - DNA, 421 bp, Lilium asiatic
  Clone ID: LIB3229-027-P1-K1-H5
attctttgataaattcaatgcatggccagtagataatgtataaataggcaacaatgttgattaaaaaaaactttgttactgtcatattatccttagttttccatcggaaaatctttccccgaattacactagcatactggaaatttcaacattaggtttccaagaatgattcatgaaaatttgtatattacacaagaaaaattgtttaaatccaacttcaccaaagatgtcaccattaaaccattctatcttttattaaatcgcttcggacttctaatacaatcattactttccaaagcatatgcccgattacgctaactgcatacccctacaatgcgtatatgtacaatacagatttaacatgatctgtactaaatcaaaggaataataagccctaatttttagtactaacaggcggatt

SEQ ID NO: 1446 - DNA, 421 bp, Lilium asiatic
  Clone ID: LIB3229-027-P1-K1-H6
ctctcctccatctctagggtttctcgatccgatggcgaggaagcgcaaatcggaggcgacggggcttgatgaggtggatcggaccatgtactccaccttctgtaccggcgccaactcgctgtcgcagctctacacccaggcgatgaatcagcagaagctctccttccaggccggcgagcgccatgcactggagaagctttaccagtggatcctgagacagcatgaggaagggtctagggtgacagcagctgacatagtaactcatattcagaatgagattgattatggagaggatgcatcaatgtcgccaagactacaatcccagtatccacatcctcaaactgcaatgcacttcacaaacccttctgcttcatatggtcaggcaactgctggaactgtccctcggggtgctccctcggat

SEQ ID NO: 1447 - DNA, 412 bp, Lilium asiatic
  Clone ID: LIB3229-027-P1-K1-H8
ccacgcgtccgatcaagctcactctcatcagcagcagcagcagcagcgcgaggacagtggggaggatcaccaagcaaataattctcagtagagtgtacaagatctgtggatgcattttgtttcgtttttaggctttgtgtgttgatccgcggttcccaatttctcgaacttcatcgaagattggattggcagctctggagctcggctgcaagctttgctgggctattgtagcaactggtcagcgaggctgagaattgagaggttttgatttgaagaaggttgcttatttgtgggtccaaggtgaccacataagagtggggagcacaaatttgtatagagaagctctatgtagaataattctttgtttgtttgagagcttagatcatttatgagaaccaggaaccaacatagc

SEQ ID NO: 1448 - DNA, 270 bp, Lilium asiatic
  Clone ID: LIB3229-027-P1-K1-H9
ccacgcgtgcgatcaagctcactcttatcagcagcagcagcagcagcgcgggggcagtgggtaggatcaccaatcaaataattttcagcagagtgtacaagatctgtggatgcattatgtttagtttttaggcttcgtgtgttgatccgcgggtctcaatttctcgaactccatcgaagattgtattggtagctctggagctcggctgccatgctctgctgggctattgtctcaactggccatagtggctgagaattgtgaggttttttt

SEQ ID NO: 1449 - DNA, 239 bp, Lilium asiatic
  Clone ID: LIB3229-028-P1-K1-A1
gcggtcggtggaacccttctataaaaacattgtcaacattcatactaacaatactactactcatttttggtgagttatattgttattggctatgtatgattaggtacggaatattaaccgggatgcatttttctgggatgcatgttacagaggagttaattgggttctgctgttttatgtttcttgtggacacaagattgatgtggctcaaagtaaatgaatatttattttattgaaat

SEQ ID NO: 1450 - DNA, 385 bp, Lilium asiatic
  Clone ID: LIB3229-028-P1-K1-A11
tcttaaccgaaatggacgggatgaatgctaagaagacagtcttcatcatcggggcaacaaacaggcctgacatcatagaccccgccctactcaggccaggccgccttgaccagctaatctacatccctctgcccgatgaagcctcccgccaccagatcttcaaggcatgcctgaggaagtcacctgtcgccaaggacgtcgatctgctcgctctcgccaagtacactcagggcttcagtggtgccgacatcaccgagatatgccagcgtgcttgcaagtatgccatcagagaaaacatagagaaggatatagaaagggagaggagggctgcggcgaaccctgaagcgatggaggaggatgaagtcgaagaggtggctgagatcac

SEQ ID NO: 1451 - DNA, 325 bp, Lilium asiatic
  unsure (1)..(325): unsure at all n locations
  Clone ID: LIB3229-028-P1-K1-A12
acgaaaccgaaaaggacgggangaacgccaagaagacaggcggcaccagcggggggacaaacaggcccgacagcagaaaccccgccctactcaggccaggccgccaagaccagcgaagcgacagccccacgcccgaggaagcctcccgccaccagatcaacaaggcaggccagaggaagacaccagccggccaaggacgacgagcagcgcgcacacgccaaggacacgcagggcaaaagaggggccgacatgaccgagatatgccagcaagcaggcaaggaagccaacagagaaaacagaggagaaggaaaaacaaagggagagg

SEQ ID NO: 1452 - DNA, 313 bp, Lilium asiatic
  Clone ID: LIB3229-028-P1-K1-A2
cccacgcgagagctagttcatctcgcttaacaaacaagcggtacctttcttataagactcatgttcgtcgaacgaggctacaatagaagctcgaacaattcacccagcgcctaatgttgcactcgctgcaaaactgatgcctgagactatatggccctgtacactgactctacgtgaatatatgggatcgagaagggttgatagctggacattaaagagtgggcatgacaaatgtgcgaccggcgtactagacctaatcgctcatagtgcacaaagtaatgattgtactaccgctccagaggatccaaggcta

SEQ ID NO: 1453 - DNA, 318 bp, Lilium asiatic
  Clone ID: LIB3229-028-P1-K1-A3
accggccggatcccagttcgagccacgcgcccgcgtgagtctgcagagctcgctaatcaataggacacaatgttggaccacactggctgatgttgggctcgacggtgctcgtagtcccgatcgatcaagttgggcagagcgtccagaagctcaagcgccatgactgaagttcgatctgttgtggcctgctactctccgtttaggttactatatttgtccgtgagcggctgcaatatgaggccagctgagtgtcttgaattatgtgcgccccgagaactccagcgtttggattctatttgaaataaaaaaatatgggcg

SEQ ID NO: 1454 - DNA, 203 bp, Lilium asiatic
  Clone ID: LIB3229-028-P1-K1-A7
cggagaggtagaacaccttctataaacacataggccacactcatacaaacaatactactactcatttttggagagctacattggcattggctatctatgacccggtgccgaatattaacctagctgcatttgtatgggatgcactttacagacgagtaaactggctcctcctgactaaatggcattgaggacacaagatatct

SEQ ID NO: 1455 - DNA, 269 bp, Lilium asiatic
  Clone ID: LIB3229-028-P1-K1-A8
acgtcaagagtcagcgcaacgcgctcctcatagccgccgctctcgtactatactggctgctgttcgccgtcacggggctcgtcgtccggctcgatcagctcggccagcgcgttgagaagctcaagcgccatgactgatgttcgatctgttctggcctgctactctccctttaggttactatctttgtccgtgagcagctgatatctggactcaacagagtgtattgaattatgtgcgtcccgtgaactaaagcttatggattctatttc

SEQ ID NO: 1456 - DNA, 366 bp, Lilium asiatic
  Clone ID: LIB3229-028-P1-K1-A9
acgcgttagattggagagaatcatatacaagaggacacaatgttagagcacactgtatgaaaatgtgatgcgatatgtgtgtaggaggcacaccatggagaaatgatcgtgcagagcgctgagaagatagagctgcatgactgaaaaaggctctctggtgatgtgctgctgtaggtaaaggatactgtgcttgttggtgacggtcacctgtatgagacaaactcgagtgtctgtgtatgatgagcacggcctgtacacaatgtttgggagagtgtatgatttagatgcttttgtgcatgcactctagatactgactgcttggctacacgcacttgcagcagattagatattttatgatcacacttt

SEQ ID NO: 1457 - DNA, 312 bp, Lilium asiatic
  Clone ID: LIB3229-028-P1-K1-B10
cccacgcgtccgtcaaaatataaaaaaaaatttaatataagttattggatttgtatgtattatattggatgaatctaaatatatactcttaaacatctattgggacagcctttgaaatattatcattgtggatacagtctccaacaaaggaaactggataattatatttagttatgtaatattatatgaaaaattttaaataaaaattttatatttttttattttattaaataatatataaattagtaaactaaaatatatgaaatatctaaagagtaaaggggaataaaaataataagaataaattcttac

SEQ ID NO: 1458 - DNA, 333 bp, Lilium asiatic
  Clone ID: LIB3229-028-P1-K1-B11
gtgaggcttgcgaatgggaacctaactctgtggttatagactccgactggatgaagaccgctgaaccggatatgaaagtatatacagagaccactgatggctcttatatacaagcgaacgagagtgctttgctatggcatgatcccgactcacattctgattctgatgcctgccaagcagaagatctacttgatcacctccagagcagtactcgccatcgatccagaggtggctatacgtggccagcatatggtggaaggtgaacccaacggagcctggaaaggggtgccggcggggaagctcatccagacattgattggtgacaggaagtgc

SEQ ID NO: 1459 - DNA, 408 bp, Lilium asiatic
  unsure (1)..(408): unsure at all n locations
  Clone ID: LIB3229-028-P1-K1-B12
tctagctatagcggtgggtatgaatctggtgctggtgctgcctatggttctggtggtctgtatggaggaggccgtggaggaggttatggaggtggtgctggccgataccatccttatgggcgctagggagaaaacaatatttgaatgctagtcagaccgctagatctttgcaactttaatagaatctgcttgttagaagtttacttagccgcccaaagtctattctagctggctattcttgagggaaagatctgtgtgctgtaacatttgatctttaactgtttttaccttttgcattcatgagggaaagatctgtgagctgtaacatttgattgtaacttttctttccttttggttgtcaggttatcgtagaatattaagcctctntatgttttcttgatatgtaag

SEQ ID NO: 1460 - DNA, 330 bp, Lilium asiatic
  Clone ID: LIB3229-028-P1-K1-B3
acgcagttcgtgcatgagcatcaaccctgatgaagcagttgcttatggtgctgctggccaggctgctattctgactggcgagggaaacgagaaggcatcaggacctacttctataggaggttaccacttctggctatgggcctacagtccgccggctggggcttgtcttccctaactccctgaatcacctccttccatacgcaaatgaagctcaacggctctaactactgtactaaccatctccaacttgtatcccaggcttaccagagtgagagtacatattatccgatactcagttaacgctgtaaacctgagctacccttaatcctt

SEQ ID NO: 1461 - DNA, 243 bp, Lilium asiatic
  Clone ID: LIB3229-028-P1-K1-B6
cggacgcgtgggattcagtgccgccgccgccgccgccgccgccgccgccgccgccgccggcgccgccgccgccgctgccgctgccgttgcctctcttcctccgtcgaccggaaaagccgctgaaatggcagctgaagatgttgttgccgaaacccctgcccctgctcttggggagcccatggacctcatgacgcgtgctagaagttgacatgaagaaaccactggcccatgatggtctcattc

SEQ ID NO: 1462 - DNA, 366 bp, Lilium asiatic
  Clone ID: LIB3229-028-P1-K1-B8
acgcagttcgtgcaagagcatcaaccctgatgaatcgaggtgcttatggagctgctgggcagactgctattctgactgttcagagaaacgagaaggatcaggacctactactcttggatggtacccacatgactttcgaacctcagactgtacgaacgagtgatgtctgctctgttccataaatacaccaccatccctacccagacgtgacatgcttactctacctactcagacaaccagccctgtatctacatccaggttgactgaaaagaacgaaccagggcccccatcatacaacccactagcaaaatttgccctcggatgcatccactcatttaatacctttttcaaattaattgctaaaat

SEQ ID NO: 1463 - DNA, 412 bp, Lilium asiatic
  Clone ID: LIB3229-028-P1-K1-B9
gcgggcatctgaacttgcgcgtctttggcgagtccaggcagctgttggagcgtgctcgacatgtaatcgatctcaagaagctgtggaacaagcttaagctcatcaagaaggctcggaatgttcggaatggggcactcattgctcgggctggggctcgtatgccctagctgactgacttccgtcctggtatgtgcgagtcatgttcaatggcgcaaactttgggactcgtaatctccaacttgtatcatgtgctacccaaagttaggttatatattatcgaatactatgctaatgctgtctccctggtttacctttatctttcagaacttgagtcttctgtgttcaagcgcatgagagcattatagcatgtaaattttgagaacctccggctttgtatattactgttctgctt

SEQ ID NO: 1464 - DNA, 361 bp, Lilium asiatic
  Clone ID: LIB3229-028-P1-K1-C1
atcgggcgcgtgcacaccatgcaagacggagctcgaagggccttttgttcttcagaatttatctgggccagcttgcactcaccacggcaaatttgcgcccgggaaattgaagcatcaagaaagatatcatgatgcacctactgaactgaagaggtgttcaaaagctgtcactgacagatggtgttcaatgtgtatttggaatggaatatcgatccctttgggagctctgtttttgatcctagtggacttattagctgatccataggcagtatgtttatatttccttttctgcattaatgtttatggttccctcatttgaccatattcatttagatctgctcagtagagatagagtgggttt

SEQ ID NO: 1465 - DNA, 374 bp, Lilium asiatic
  Clone ID: LIB3229-028-P1-K1-C11
atcccgaggcacgtctgccttgctgtcaggaacgaccaggagctgggcaagctgctcgctggagtcaccatctcccatggtggtgtcatccccaacatcaacccggtcctgctccccaagaaggcagctgagaagggagattctgctgcgcccaagtcccccaagaaaacccctaagtctccgaagaaagccaccaagaccccaaagaaagcttaaagggtgtgttgtaaggtccagtaggtggtgaatttgaattagggcatttcgattgtaaaattggaaggagcgtcggtgattttctgtactgggcggtcaggatttgctgtgtgtgggttttagacaatatatgcagttgtcttcgtttgtcatctaaa

SEQ ID NO: 1466 - DNA, 410 bp, Lilium asiatic
  Clone ID: LIB3229-028-P1-K1-C12
cccacaaacatcatttgatctggtatttgagaaagaattcttgttgtctcacagctcaaagagtgcaagtgtctttgtgtgtggatacaagtctgcaatggctgatcctgaatctgatggattttcaggcaccgactctgattcagaatctgaacctgagcttgagccgattcaacttgcacctaaatctaatgcaggtaaagttgtggtaaaggagcaagccaaggctggaaaggctacctctgagaaagtttctgataatgcagaaccttctgccaagaccaaatctaaggcagaagcaaagtctgagaaaccaaaaccagaagattctgatgatgatgattctgaggatgatgatgagtctgatgatgactctgatagcgaagatgaggccatgcctgatgctgggg

SEQ ID NO: 1467 - DNA, 410 bp, Lilium asiatic
  Clone ID: LIB3229-028-P1-K1-C4
caagaattactcagtctacgtccccgacctcctcttcttcgggggttcgaccaccgacagcaccgaccgctccccagattttcaggctgagtgtctgaccaccgcgctggatctgcttggtgtggagcggtgcacggtggtgggcttcagctacgggggaatggtcgctttcaagatggcagagacgcgaccggaactggtggagaatttggtggtgtccggctctgtgatagctatgacagactccattagcggagagacgcttgagaggttagggttttcgtcatcatcggagctgcttctgccggagtcggtgaaggggctgaaagctctgttgtccattgcatcttacgggctttggtttcctgagttttcttacagagactatcttgagatatgtgacactgatt

SEQ ID NO: 1468 - DNA, 190 bp, Lilium asiatic
  Clone ID: LIB3229-028-P1-K1-C5
attaaactttataggttcataaccaagtttaatttagtatgtttgatgtttattcatctgtgtagggtggctcttctgtttatctttttattcagaatggacagtttttaggtttttaacagagtggttacctatttatgaaatatttgttgtgtttgtagtttataatgttaaatttattgtcttctgt

SEQ ID NO: 1469 - DNA, 345 bp, Lilium asiatic
  Clone ID: LIB3229-028-P1-K1-C7
gcggagaagcccgccgttgaggaggagaagaagtcagccccggcagcggcaccggcggagaagaagctggccgagaagaagcccaaggcaggaaagaagctcccggcctccaagggcaaggagggggagaagaagaagaagcggccgaagaagtcggtggagacctacaagatctacatcttcaaggtgttgaagcaagtccaccctgacattgggatctccagcaaggccatggcgatcatgaacaggttcatcaacgacctcttcgagaagatggcccaggagtctgctcgtctcgctcgctacaacaagtagaacactatgacctccagagagatccagacc

SEQ ID NO: 1470 - DNA, 384 bp, Lilium asiatic
  Clone ID: LIB3229-028-P1-K1-C8
caaaccctggccgccgatctgtgatctccgatggcccgtaccaagcaaaccgctcgcaagttcaccgtctggaaggcccctcgcaagcagctctgcacaaaggctgacaggaagtcggctccaaccactggcggcgtgaagaagccgaaccgctaccgtcccgataccgttgtcctccgtgagatccgtaagtaccagaagagtacggagctgctgatccgaaagctgccgatccatggtgtggtgagggagatcgcgcaggacttcaagacagatctccgttttcagagccatgccgcgctggctctccatgaggctggcgaggcgtaccttgtggggctgttcgatacaccaatctctgcgcaatccatgccaagcgcgtta

SEQ ID NO: 1471 - DNA, 316 bp, Lilium asiatic
  Clone ID: LIB3229-028-P1-K1-C9
ggcccagacccacgcgtccacaaaccctttccgacgatctctgatctccaatggcccgtaccaagcagagcggtgtgtttgtacaccgtcggcatggccccttgcaagcagctcgccacaaaggctgcgaggaagtcggcgccaaccactggcggagtgaagaagccgcaccgataccgtcccggcaccgtcaccctccgtgagatccggatgtaccaaaagagttcggagcctgtgatccgaaagctgccgaaccagcgtctggtcagggagatcgctcaggcattcctatacggatcttcatttacagagccat

SEQ ID NO: 1472 - DNA, 415 bp, Lilium asiatic
  Clone ID: LIB3229-028-P1-K1-D1
atcccaccctcctctcccggcggctccgatttccaaccctcatcagatacaatgaaggtcattgctgcctacctcctggctttacttggtggaaactctagcccgtcaagcaaggatatcaagcatattcttggttcagttggtgctgatgctgaagatgagcggattgagtttttgcttgctgaagttaaaggcaaggatataactgagttgattgcttctggaagagagaaatttgcatctgttccatctggtggtggtggtgtggctgttgcagtgtcggcaggtggtggtggtgcagctgcccctgcagcagcagctgctgagccgaagaaggaagagaaggtggaggagaaggaagaatctgatgatgatatgggatttagcttgtttgattaagtgctgcgcttttgat

SEQ ID NO: 1473 - DNA, 411 bp, Lilium asiatic
  Clone ID: LIB3229-028-P1-K1-D11
ggttaaactaggccatgttgactgtgatgctgagaaatccctgatgagcaggtttaatgtacaaggattccctacaattttggtgttcggtgccgacaaagacagcccaatgccctatgaaggggctcgaacagcttcagctatcgagtcatttgctctagtcatgctagagactaatatcccaacacccgaagtatcagagttgactgatcaggctgtgatggaagacaaatgtgcttcagccccaatttgctttgtagcttttcttcccgatatattggattcaaaagcagaaggaagaaacaagtacctagacatgttgatgtcagttgctgagaaattcaaaaggagcccgtacagctatgtgtgggccgcggcagggaagcaggctgatctcgaaaatcaggttgg

SEQ ID NO: 1474 - DNA, 379 bp, Lilium asiatic
  Clone ID: LIB3229-028-P1-K1-D12
caattggagtgttggatgctgcatgcttgagctacaagagtgatgatgcaactggtggccgacaggttgattcttgtccttcttctccggctataaagagaaggaagataagatgaacatattaaggataaatcgatcttcgatataaacggggaataattggaggccatcaacccttttgcatctttctacatatagatggacgatgaggccgttagcagttaagttgcgaaaaacctcaagccagagagaaaattagagtactgtaatgaacaatgtggcttggatcgagtatttgttcaactttgccttcgttttttttattaatctgtgaaaaatcaagtaaaaaatgttgcattttgatcgaaaatttactgcc

SEQ ID NO: 1475 - DNA, 218 bp, Lilium asiatic
  Clone ID: LIB3229-028-P1-K1-D2
tctctaaaggatccaagcttacggggggggggggtcaatcttttttttttattcttaaaaaaattttaaagtatattttcattaaatttttttctaaatttattaaaattttttattttttgtttttcaaaattttatgtttttttttaaaaaattttttttcttccttcttgtctttatttccaatatttttttattgtatattttaatttttttta

SEQ ID NO: 1476 - DNA, 245 bp, Lilium asiatic
  Clone ID: LIB3229-028-P1-K1-D6
tggagtgttggatgctgcatgcttgagctacattgagtgatcattcatcggggggccgacaggttgattcttgcccttcttctccggctattaagagaaggtagatctgatgaacatattataggatatacatcgattcttccgatattaatacgggggaattatttggtaggccattcaacccattttggatcatttctacatatagatggacgatgaggccgttagcattttattttcaaaat

SEQ ID NO: 1477 - DNA, 412 bp, Lilium asiatic
  Clone ID: LIB3229-028-P1-K1-D9
ctctcccctcggatcccttcgtcgccgcttctctcccccatcatccatggcgattccagggccctactccggatccagcaccctcgccctcgtcgcccgcaccgcggcgttctcgtatggcgtcgtctacggcagcatcaagctctcctacctcaaggctaaggcgaaatctcaaaagaaagccgaggcaaaagctcatcactgagtgtagtctgacctcgaggtgttttttctgctgtcaatgatttctttttatccaaaccaaaatacaggaagcatggttggaatttgaagccattacttgttctcaataatgtagcttctgttactcggcattgttgccaccttttgtttactgttttgttgtttagttcctaagctactgttcaactggtgaatagaatattctgct

SEQ ID NO: 1478 - DNA, 199 bp, Lilium asiatic
  unsure (1)..(199): unsure at all n locations
  Clone ID: LIB3229-028-P1-K1-E1
gccaannggggagagtgtgccataccttttcccccccccccccgccccctgagagaggaggaggacctaaatcagagacgaccgaaaaaataatccgaacatgtcgacaccatttaggaagaggctgaagagaaatttcaagcggttgtaacacaaccctccggcggtgatcaacaatacgccgcaggacatcaacatc

SEQ ID NO: 1479 - DNA, 399 bp, Lilium asiatic
  Clone ID: LIB3229-028-P1-K1-E11
tggctcgtcaacaccggttggtctggtggaaggtacggtgttggcagccgcatcaaactaccttacactcgtaaaatcatcgatgctatacactctggcagcctcctgactgccaactgcatcaagaccgaggtgtttggtctggagatccctacagagatcaaaggtgtgccatcggagatcctcaacccagtgaatgcttgggaagacaaaatggcctacaaggagactctgatgatgcttgctggcctgtttaagaagaatttcgaggtatttgcagattacaaaattgggaaggacagcaaactaaccgaagaaatccttgctgctggtccgaacttctgagaaagtcaaatatttggtggctgttgctacccattccaccataccctagtcatt

SEQ ID NO: 1480 - DNA, 253 bp, Lilium asiatic
  Clone ID: LIB3229-028-P1-K1-E12
aaaaccaaatcatatatactttccacggaaagtacaatcggtcaggagattttaaagaagagagtttgattaggacattaaagtaaaagggaaattaataattgagacatatttactataaatgcttctaacttattaaggtacaatttgaagggaaagccagatcaaccatacaaaggttgattaggacatacaataagagggaattaatatttgagacatactttcaatgcttgtcgtgtattaaggtatg

SEQ ID NO: 1481 - DNA, 424 bp, Lilium asiatic
  Clone ID: LIB3229-028-P1-K1-E2
ccacgcgtccggtgaaatgttgtttactttaacagaaatcaatcaatgaggctgcttcggcttggggtttgaagtgcctcagatatgaaataagggacatatctcctcctgctggagtgaaagccgctatggagatgcaagctgaagctgaaagaagaagacgtgctcaagttctggagtctgaaggagaaagacaagcaaacataaacattgctgatgggaagaaagcctctgtaatattggcatcagaagcagcaatgttggatcaaattaatagggccaagggagaagccgaggctatccttgccagagcggaagcaactgctggaggaatcaagatggtgtctgacgtcattagagcggaagggggcacagaagccgcaagcctaagagtagcggagcaatatatcaaagcattcggacg

SEQ ID NO: 1482 - DNA, 357 bp, Lilium asiatic
  Clone ID: LIB3229-028-P1-K1-E7
ctcatccgttgcttcctattgttgaagcttctgtctacaatcattcttggcgcagcctgggtccaccttaagaccctgcaatctctccactcatgcccgcaccgcagcctactggtatggcgatattttacagcaaaataaaaaaagggctgaccgatctagagggcccaagcttaaaagcacgcgcatgcaacagcacatctctgctagaaggccaccctaatggagttcactgtgctgccaatgactaacttttgtccgggccaaccttcacgatgcccgactgaaattcgaagccattcctcgcccttaatacagctgcctttgtttctaagaggtgctgaccgctcgtgctta

SEQ ID NO: 1483 - DNA, 131 bp, Lilium asiatic
  Clone ID: LIB3229-028-P1-K1-F1
gcggagagccactgatcgggatctatccacttttgttcgaactagtgagactggtgcaggctttgagttgcagggtgttaatattcatacataaggctatattttgtggttatatatagactgctatttga

SEQ ID NO: 1484 - DNA, 417 bp, Lilium asiatic
  Clone ID: LIB3229-028-P1-K1-F12
cgccgggccaccggcggcaagaagaaggcatggtggaagaagccaaagtacgagctcggccggcagtcggcgatgacaaatctgtccaacaacaagacagtgaggtgggttcgtgtgcgcggctgcaacgtcaagtggcgcgcacttagacttgacacgggcaacttctcgtgggggagcgaggctgagactcgcaagactagcatccttgatgtgcattacaacgcgtcatacaatgaacttgttcgcaccaagacgcttgtgaagggtgctattgtgcaggttgatgccgctgccgttcaagcagaggtatctccagcattatggtgtggagattgggaggaagaagaaagctgctacatccaaaaaggagaatgaggcaactgacgagggcgaaactgcaactgatgtggaagc

SEQ ID NO: 1485 - DNA, 236 bp, Lilium asiatic
  Clone ID: LIB3229-028-P1-K1-F3
cccacgcgtccggggagatccagacctcggtccgccttgtcctccctggtgagctcgccaagcatgccgtctctgagggcaccaaggccgtcaccaaattcaccagcgcttaggctttgttctgttcggtttggtaatttgtagctgctattaaaatgtttcgatttctgatcgaagcttatgttatttcagtttcccgtcgtttgaatcttgctctataattatttttctcaatc

SEQ ID NO: 1486 - DNA, 419 bp, Lilium asiatic
  Clone ID: LIB3229-028-P1-K1-F4
cggacgcgtgggttcggccccaactcatcagcaatgtcagggcgcggcaagggcggaaaggggctcggcaagggcggagcgaagcggcaccggaaggtcctccgcgacaacatccagggcatcaccaagccggccatccgccgtctggcccgccgtggcggcgtgaagcgcatcagcggcctcatctacgaggagacccggggggtgctgaagatctttctcgagaatgtcatccgcgacgcggtcacctacactgagcacgctcgccggaagacggtcactgccatggacgtcgtctacgcactcaagcgccagggccgcaccctctacggcttcggcggctgatctatcctatctatctagggtttttcttgttgggattatggatcataacttggtgttctgttactcttggtttt

SEQ ID NO: 1487 - DNA, 419 bp, Lilium asiatic
  Clone ID: LIB3229-028-P1-K1-F6
gttacgactggcgctgtcggtgatttacagcagatcactggcttggccaagcagatggtgaccacgtttggaatgtcggagatcgggccatggtcgcttatggactctggaggacagagcggggatgtgatcatgagaatgatggcgaggaactccatgtccgagaagcttgcagaggatattgacgctgctatcaagcggatatcggacagcgcttacgagattgcgttgggtcatatcagaaataaccgagaagcaatggataagatcgttgaggttctccttgagaaggaaaccatgacaggcgatgagttcagagcgattttgtcggagtttactgagattcctggcgagaacagggttgctccggctacacccacagcgatagctgcttgatccggttaatagaagcacattat

SEQ ID NO: 1488 - DNA, 407 bp, Lilium asiatic
  Clone ID: LIB3229-028-P1-K1-F7
gcggccggcagtcagttcttcgtccttcctctaatctgagcttcttctaatcattcgttgcgacctgtttttgtgtttctttgatttgctcgcaggttctgctcgattcatagcggcggcggcggatctgacggagggtgagtgatcatatctgacggaggttgtagcggcggtggcggcggctctgatggagggtgattgatcagatctgtcggaggttgtagcggcggcggctctgacggagggtgagtgatgagatctgtgacgttgtaagggattggaagagatcgtccgttcttcttaaatacttatctcaagattggtggagatcggtcgggatctctcgagatctgtgctgatctggcgagttctgcgtcactctaccaagatctacgttttcctcttta

SEQ ID NO: 1489 - DNA, 411 bp, Lilium asiatic
  Clone ID: LIB3229-028-P1-K1-F8
agcatttcagctcaatccaattcctatgcatatagctggtctcataataccatcttcggatgactccaagatcttcatgcaatattataacagctccctagttagagatgaaacttcaaaattaataatcaagtttggcggttctgcaaaagtattaggaggtttaaaggccaactacagcaactcggcaccaaaagtaatgtactattctgctagaggacccgacccagaggacaattcgctcataaatgcagatataatgaagcccaatttgatagcccctggtaatctcatttggggtgcatggagtttgcagggcacagactccactgaatttgaaggggaaagatttgctatgatatctggtaccagtatggctgctccacatgttgctggtcttgccgctttgat

SEQ ID NO: 1490 - DNA, 321 bp, Lilium asiatic
  Clone ID: LIB3229-028-P1-K1-G1
cccacgcgtccgatctgcaaccctatcattgctaagatgtaccagggcggtgctggtccagatatgggtggtatggatgaggatgatgatgttcctactggaggcagcagtgctggtcccaagatcgaggaggtcgactaagtttcttttataacgctttttttaggtaactgaaagtatttccttggctatcttgcctttgactgcttttgatggtgaacaccttacctgttatgtttaactactttatggctacattagtattctttttggttatctgcatgatgaacaagttgggtctaatggattaaattcgaattc

SEQ ID NO: 1491 - DNA, 95 bp, Lilium asiatic
  Clone ID: LIB3229-028-P1-K1-G10
gcggccgatctataggatccaagcttacttacgcttgcatgcaacgggagaggtggtgtatagtgtcacctatatacaattcactgaacttagta

SEQ ID NO: 1492 - DNA, 412 bp, Lilium asiatic
  Clone ID: LIB3229-028-P1-K1-G11
gccgagtcaaagctgcaagagttgaagtcaaacatgaaaacactgggtaaggaagctgtttcagcaatgactgctgtagaagctcaacagcaaaggttaacgttacacaggcttgtctcaatggttgaatcagaacgcacatatcatcagagagtattacaaatccttgatcagcttgatggagagctcttgatggagcgtcaacgaattgaagcagctccaaacacagtggtggaagaccatatgccaccacctccatcatatgaagaagccaacggtgtttttccttcccagatagttgaaggattatccgattccatggaatactttttgggagaggttatgtattcatatcaggcggagtcagacgtagagcttagcttatcagttggcgagtacattgttgtaagaa

SEQ ID NO: 1493 - DNA, 409 bp, Lilium asiatic
  Clone ID: LIB3229-028-P1-K1-G12
agcatgtgttgatcggggtaggtctgtaacaggaggattcttgtgcttttgttgatgatatacaatagataatgtaaggagtagtaagaggaactgaggctgaggctattggaagtgcgacatgaggaattgggacatgagtagaggccctaaaaagggagaggagggatgactcgaagtaaaggaaaggaggaaggagagggagttgagggaggactaagaatcgaaggatgagtgtcacgatggtaagaaaactaaggtcaagatcctttgtgggaaagtagggcaaagactcgtcaaactcaatgtgacacgagatgcgaacatgatgattaatatgatcgtaacgacaacctttgtgctcagtaccgatgccgaataagacataaaagacaacacgaggagataa

SEQ ID NO: 1494 - DNA, 412 bp, Lilium asiatic
  unsure (1)..(412): unsure at all n locations
  Clone ID: LIB3229-028-P1-K1-G2
aaaatgaagaataatggggtcggtgtgggtgctgtggagaatgtggctgctgtggacaacaatactctcaatttcgatggcgaatttcctggcattgatacatttatgtttgatcaaatcccttgcttcgaaggtaactcagatgagtcaattgactttacattcaccaacgaagcggcccaggatggtgcgagtgcattccctgagatggagcgcctctggttcgaggacctgggtggtgccttctgagcggtatctgtttctggtggcaagcttttgtgaataaaataaaatgaattgggaaatatggagagtcggaggtgtctgctgtgaatctgtgatgttgtttcgccagtctttagcttatgcagttgtctntattcttttctgttgctttagcttatgcaattac

SEQ ID NO: 1495 - DNA, 410 bp, Lilium asiatic
  Clone ID: LIB3229-028-P1-K1-G7
ccacgcgtccgcaactctagaatcatctcttcgtcttggtcaacatcaacgtcgtatacttggttgcccttgcacatcatcgtgcgtatcgacaatagtatcgtatgcaccttgcagtggttacttatgtatccagtggtagcagagggaccaagttggtcatagtattctgtagggaaggagagactcgatcgggatccaccacctaataatctcccacgtagagattgatccattgcattggtctctcgtctcctcctaccggtcttcaaatatgatgttgggtttaccttgagactactgatatgatgaggccaatgctgagaacaactatgacaaccgttgcttcttagttgcagttttttgttgagaatgatgcttatccgtggaaccgttctattcccttatga

SEQ ID NO: 1496 - DNA, 153 bp, Lilium asiatic
  unsure (1)..(153): unsure at all n locations
  Clone ID: LIB3229-028-P1-K1-H1
gnaccagaaagcgagcagacgaccaagaggaaccaagcagacgaacacggggaggcgacgacanaacaccaaaacaagggcaccaaaacgcaacacaccggccgacgagaaacaacggcgngacggggaaaacccaggcagaaccaaacaaaa

SEQ ID NO: 1497 - DNA, 261 bp, Lilium asiatic
  Clone ID: LIB3229-028-P1-K1-H10
tgagtgttggtgaataactctttaaacttaacatcattatattattaattccttcaccaaatatatttaattctctagtttaagatctcaatccatcatctttcaatagttttaaaatgtaaagattctagtacaacatcttttaatagttttaaaatattatctttgatggattcaaatacaagtattattgttttgacaatctgatgatgaacaatgaacatacttgtctagatttatttaatatgataaaatttgata

SEQ ID NO: 1498 - DNA, 419 bp, Lilium asiatic
  Clone ID: LIB3229-028-P1-K1-H11
gcggaacaagtgcacatcgaaaatgctgttggctgccattgatgaaaaccacgatgagcacttatgattttgtttacttgccaattagatttcaagaacacgtgcaatgtgggatatgcgttcataaacatggtgtctcctttacacatcatacccttatatgaggcatttaatgggaagaagtggcagaagttcaatagtgaaaaagttgcatcattagcatatgcccgtattgatggactggatgcacttattgctcatttgcaaaattcgagtctgatgaatgaagacaagcggtgccgcccaatcatgttttattcagatggatctgcaactgttgatcaggaaaccttgttaccaaatggcacattctgcgattatcatcatgatggggcctgttcgcacatttcacaaggaag

SEQ ID NO: 1499 - DNA, 235 bp, Lilium asiatic
  Clone ID: LIB3229-028-P1-K1-H12
cccacgcgtccgaagcttttctgatgacagtctcaatctgctcgcatgggtggggtggaacatgtcaggaagcattattttatagtttttttgcgttgaaaatgagtgttttgaacgctcgcaggctataaattaagttgaaatattattgaacttatgttttccagttgtgagaatagcactctttgttcccgctttcttagtatctctgggttatttgccacctggtcagaaa

SEQ ID NO: 1500 - DNA, 418 bp, Lilium asiatic
  Clone ID: LIB3229-028-P1-K1-H4
gtcatccagttccagaaccccaaagttcaagcttcaattgctgccaatacctgggtgattagcggctcacctcagacaaaaagacttcaggatctcctgcctacaatcatcaaccaattgggtcccgacaatttggataacctgagaaggcttgcagagcagttccagaagcaggctccaggcggcgctgctgctgccgctaccgcagctcccattcaggaggacgatgatgacgatgatcatatccccgatcttgtgcctggagagacatttgaagctgctgcggctgaagaaaaggtagcttcatagaggtcattgtttctaatgaaacttccaaatccaggcagtcttgcaaggttctgtccttcaatatttttctcttgcgtgtaatagttcatctgatagaagttgattatga

SEQ ID NO: 1501 - DNA, 380 bp, Lilium asiatic
  Clone ID: LIB3229-028-P1-K1-H5
ggaagtgaagccaaagacagaaacagaggtggaagaaccttcagctgcagcttaggtctgatgaaacattccagttggttggtatactatttattttccctcagttgagcaccaaggtcagtaataatctgcagaaacttttcttgagtctggaattggattgaaatttgtgtggtggaaagtgacgctgagtcggttggtaaagtcagtccctttggtgggtatgggttttgttgttggattgggaggagatttctgcttttgtgcgaaggtagtagttttgttgggtgaacagtcctcgagttacttgggtttaaagtttggatttgttattggtactgagtttggtttttgagtgtctttggcattgccacttttgg

SEQ ID NO: 1502 - DNA, 240 bp, Lilium asiatic
  Clone ID: LIB3229-028-P1-K1-H6
ctcacgcacacggcgatgcaagggtttcctgcacagatgatgcacgctcaagggccgcccgcaccacaggcactcatggatccggtaacgtggactctgatcccatacattttctggcttaagtcaaacctaagcctgatatggtgttccccttaccaaccgccttgggtggcaggctgcagagaatgttctgatttgtcaaaaaggggctcgcaagcggcttcacatcgagatcgaacg

SEQ ID NO: 1503 - DNA, 382 bp, Lilium asiatic
  Clone ID: LIB3229-029-P1-K1-A10
ggcgaaaatggccagtgaaccactagcatgaatgtaaggtattgggagtcaagatcgcacctcggattcaccttgccttgtggtgtgtgattgtaggggatgttgcgagcactccaccatgcaagggtgttggttcgggcattgacttccccttcttaggagttctgaagcattcaaaatctgcttgttctagatttcttctgtttgtgttgtttttatggtttaatggacataactggagttctgaagcattcaaacatctccgtgctctagatttcttctgtttgtgttggtttgatggtttaatggacacaattacataatccaaccagacattttggttcctaatgtaatcgaaagttgaactatattgatgtctttt

SEQ ID NO: 1504 - DNA, 360 bp, Lilium asiatic
  Clone ID: LIB3229-029-P1-K1-A11
cggacgcgtgggcgatggtccactaagctagggcatgctggttttgatgtctcgataccatatgctgcatttcatctcttgaccatctcacaagttgatttcacaaactaccaaaaggatctcaactctgtaacacgtcaactcagcgaggagcagcaaaatgtagaagctttgaaattggagcttctggtatccgaaagtgtagtttgactcaattcaaaaattgaagatctaaagcagcagctcacagatctcaaattggaaaggatgccactggagccgataagaagaatggagattgagtttgagaatatggtacaagtgtaaaggctcgcaagctacaaaaatgaaagaactcta

SEQ ID NO: 1505 - DNA, 365 bp, Lilium asiatic
  Clone ID: LIB3229-029-P1-K1-A12
cccacgcgtccgcccacgcgtccgggctctaccccacccaggacaccaacatggacaagacgttcgccaagaacctcaagcacacctgcccggctgccaacacgaccaacacgaccgtgttggacatacgctcgcccaacaagtttgacaacaagtactacgttgatctgatgaacagacaggggctgttcacgtctgaccaggatatgtattctgacaagaggacgagggggattgttaccggttttgctatcaatcagtcgctatttttcgagaggtttgcttactccattgtcaagatggggatgctgacggtgttgaccgggaatcagggggagattagggctaactgctcggcgaggaat

SEQ ID NO: 1506 - DNA, 376 bp, Lilium asiatic
  Clone ID: LIB3229-029-P1-K1-A3
ctcagcgagcatcggctctagcagccctatcttctgcatttaatccctcggctgaacccaaacctacaaacacaaaaccatcacgcccaggtggtggttcacagagagccgctgcagttgctgcactatcttctgttctgaccgcggagcaaaagaaggcacaatctgaatcatctggtgcaagaatcagcagaagctcctctcttgatccattatctggagatgacataaaaactgaaactgctgcttcttgggtgccgtcccccaagaaggaaagcgcagaggacccaacagagagcaccgaagtggattctgaggcgatagaggacacagaagaagacaacagtggaggtgacggcacattcagctaccaacg

SEQ ID NO: 1507 - DNA, 251 bp, Lilium asiatic
  Clone ID: LIB3229-029-P1-K1-A4
tcgctcagcgagcatcgactctagcagcactaatcttctgcatttaatgcctcggctgaacccagacctacaaacacaaaaccttcattctcaggtggttattcactagagagccgtttaagttcttcaactatcttttgttctgaccgcgtaccataagaaggcacaatctgaatcatttggtgcaagaatcatcagatgctcatctattgatccattttcttgggagatgaccatttataactgaaact

SEQ ID NO: 1508 - DNA, 164 bp, Lilium asiatic
  Clone ID: LIB3229-029-P1-K1-A5
cgcctgcggtaccgtcccgattccggtcgaccacgcgtccgcgagcggcgtctagaggatcaagctactcgcgtgcatgcacgaactttataggactaatcatcactgccgcgttacacgcggactggaaaccctggcgtaccactaatgctgcacacatccct

SEQ ID NO: 1509 - DNA, 228 bp, Lilium asiatic
  Clone ID: LIB3229-029-P1-K1-A6
ggctggcagcagggctacctggcatatgatcatggctgaatgatgcagctcattgagtctcaatggcaaaccttcaccaggtggagataaaccctgaaatgattggccactaccttgctgagctctacatcttctacaagccggtcaagcacgggaggcctggtattggtagcacccactcttctaggctcatccctctcaagtaagtgtcagattcagagcccctct

SEQ ID NO: 1510 - DNA, 119 bp, Lilium asiatic
  Clone ID: LIB3229-029-P1-K1-B1
cccacgcgtccgccaacgcgtccgggtctcgatcgcgggcggtaggtctagaggatccaagtatacggacgcgtgcgtgccacgtcatttctcacgtatagcgaggcctacagtgaatt

SEQ ID NO: 1511 - DNA, 356 bp, Lilium asiatic
  Clone ID: LIB3229-029-P1-K1-B11
gcggatccacttcatgctttccttctacgcaccggtgatctctgctgaaaaggcctaccatgagcagctctctgtcgcggagatcacgaacagcgcgttcgagccagcatcgatgatggcaaagtgtgatcccagacatgggaagtacatggcctgctgcctgatgtaccggggtgatgtggtccccaaggatgtgaatgcggcggtggcgacgatcaagacgaagaggacgatacagttcgtcgattggtgttcgacgggattcaagtgcggaattaactaccagccaccgactgtggtgcccggcggggatcttgcaaaggtgcagcgggcggtgtgtatgatatcgaattcca

SEQ ID NO: 1512 - DNA, 387 bp, Lilium asiatic
  Clone ID: LIB3229-029-P1-K1-B12
aaacaagataaaacagagagatcttcaggtaaaagaccaccgacaagcaagggtgaagatgcatctgggccaagcaagaaggaattgaggatggcaatatgtgaaattcttcagggcgttgatttcagcacggccactttcagggacgtcatcaatcagattactgactcctacaagatggatttgatgccaaaaatggagactatcaaatcaatgatcgaagaagagttgagaaggctggtagttgatgacgagaaggaagtagtcgcctccaaatcttcaggtaaaaggatgaaagtttaattgtgaaatgatgactctgtagatgatatttgctctctgtcggaattgtgaaacttgtaatatatagcttctgaaaatacttaa

SEQ ID NO: 1513 - DNA, 394 bp, Lilium asiatic
  Clone ID: LIB3229-029-P1-K1-B2
cccacgcgtccgcccacgcgtccgcccacgcgtccgtgcttgcgctattaccttcggaggcctgagactgatggagatagttattgatagcccatccagggtaacacagaattaaagcatgattacttcactgccctcactgagttcatttttctgtaattagagcatgttgagctcatttccaattttataccacaaactttacatgacccgcatttactaagcctgcaacagcggtgtcattcttggatttcatgagtcggttctgtattgacagcgggctgttttttcggatttcatgagtatgttctgtattgacagcgggcagtattttttggcgttatggctcttactattactataagttctatgacgttgaaggaaaaatactttt

SEQ ID NO: 1514 - DNA, 392 bp, Lilium asiatic
  Clone ID: LIB3229-029-P1-K1-B3
ggcagttgggccaatagtggatggtgatgctgttgtaacattcaacttcagagcagatcgtatggttatgcttgctaaagctctagaatatgaagattttgacaagtttgaccgtgttcgctttccaaagattcgatacgcaggaatgcttcagtatgatggtgaattgttgctttccaaaaagtacctatgtttcttctccagagattgagaggacttttggtgaatacttgttgcacaatggtgttcggacttttgtttgtagcgggactgttaaattcggtcatgttacctttttatggaatggaaatcggtatgggaactataactaagccttggaagagtatgttggatatttcagcgacagcggatttacattcaatgtttatccg

SEQ ID NO: 1515 - DNA, 258 bp, Lilium asiatic
  Clone ID: LIB3229-029-P1-K1-B4
gtttgggcgaaagggtcatgctgtgggtgatattcctggtgtgaggttcaaggttgtgaaagtttcaggtgtgtcgctgctggccctcttcaaggagaagaaagagaagccccgttcttaaatcttacttaccatgatattatcctgaatgtctgtcccggtaggaacttgtttcttttgatatctttttctgtgattttgttgtgtaagaatcctggatttcaattattaagtcttctacctcagtatttactattc

SEQ ID NO: 1516 - DNA, 386 bp, Lilium asiatic
  unsure (1)..(386): unsure at all n locations
  Clone ID: LIB3229-029-P1-K1-B5
agatcagggtcaaggtggtttgtacctctctctgccggagtgatattacccagtgggaatccaaggcacaacctgctctatttccaaggatcttcgggcatgaagcatccgggattgttgaaagtattggaaacggggtaactgaatttgaggtgggggatcatgtacttacagtattcatcggagaatgtgggggatgcagacactgtatttctgggaaaagcaacatgtgcactgtactgggtctggagaggaaaggtgtcatggcacagtgatcagaagactcgattctcgataaaaggaagcccggtttatcattactgtgcagtatcgagcttcagtgaatatactgttgntcactctggttgtgcggttaaaatcagctc

SEQ ID NO: 1517 - DNA, 380 bp, Lilium asiatic
  Clone ID: LIB3229-029-P1-K1-B6
caactccctgatttcaacttagagagagctgaagagatggaatctggaaagatagccaagggtgctgctggtcgcaagggtggcgcacggaagaagtccctcccaaaatccatcaaggctggactccagttccctgtcggccgcatcggccgctacctcaagaagggccgttatgcaaagcgtgtaggctctggagctcctgtttacctcgccgccgggcttgagtatcttgctgctgacgtgctggagctggctggcaatgctgctaaggacaacacgaagtctcggatcatcccgaggcacgtctgccttgctgtcaggaacgatcaggagctcggtaggctgcttgctggagtgaccatctcccatggtggtgtgat

SEQ ID NO: 1518 - DNA, 222 bp, Lilium asiatic
  Clone ID: LIB3229-029-P1-K1-B7
cccacgcgtccgcccacgcgtccggctatacatccctgcttgcactattacattgggcggccttacactcatgtacatagttcttgatagctcatctatagtgacacataatttaagtataatgtccatactttgacaactgagtgaatgggaatgccttgtgagcacccaccgtaattacccacacagtatatcacattatgtacatgtcgcgtatttact

SEQ ID NO: 1519 - DNA, 383 bp, Lilium asiatic
  Clone ID: LIB3229-029-P1-K1-B8
ggcagttgggccaatagtggatggtgatgctgttgtaacattcaacttcagagcagatcgtatggttatgcttgctaaagctctagaatatgaagattttgacaagtttgaccgtgttcgctttccaaagattcgatacgcaggaatgcttcagtatgatggtgaattgttgcttcccaaaaagtaccttgtttctcctccagagattgagaggacttctggtgaatacttggtgcacaatggtgttcggacttttgcttgcagcgagactgtcaaattcggtcatgttacctttttctggaatggaaatcggtctgggtacttcaacgaagccttggaagagtatgttgaaattcccagcgacagcggaattacattcaatg

SEQ ID NO: 1520 - DNA, 203 bp, Lilium asiatic
  Clone ID: LIB3229-029-P1-K1-B9
tcgggcagttgggccaatagtggatggtgatgctgttgtaacattcaacttcagagcagagcgtatggttatgcatgctaaagctctaaaataagaagaaaatgacaagttagaccgcgatcgcttttcaaagaaatgatacgcaggaaagcattattatgatggtgaaaagatgctttctaaaaaagaaaaatgttttttct

SEQ ID NO: 1521 - DNA, 250 bp, Lilium asiatic; identical to SEQ ID NO: 1323
  Clone ID: LIB3229-029-P1-K1-C10

SEQ ID NO: 1522 - DNA, 351 bp, Lilium asiatic
  Clone ID: LIB3229-029-P1-K1-C11
cggacgcgtgtgcaatcgttcactaagctagcgcatgctggttgctatgaatggataccatatgctgcattttatctcttgaccatctcacaggtcgatttaacaaacttccaaaaggatctcaagtgtgcaacaccataactaatccaggagcagctaactgttgaacctgtgagatgtgagcttctaggatgcgaaagcggaggttgactcaatccaaacattgaagatcttacgcagcagctcacagatctcaaattggaaaggatgcctctgtaaccgccaagaacaatggtgattgcgtttgagaatattgtacaagtgtaaagggctcgcaagcttacaaaaatg

SEQ ID NO: 1523 - DNA, 119 bp, Lilium asiatic
  Clone ID: LIB3229-029-P1-K1-C12
cttagaccggggacgtggcgcctagaggatacgcgtatacggacgcacgcatgcagctgaatacttcttgtataccgatgcctgaccagaaatcactagcctggcgcaatgctgcgccc

SEQ ID NO: 1524 - DNA, 236 bp, Lilium asiatic
  Clone ID: LIB3229-029-P1-K1-C4
tccgaagttccgggacggacccacgcgtccgcaacaagataaaacatagagatcttcatgtaaaagaccacctacaagcaagggtgaggatgcatcttggccaagcaagaaggaattgaggatggcaatatgtgaaattcttcagggcgttgatttcagcacgggcactctcaaggacgtcatcaatcagaaaactgacttctacaagatggatttgttgccgaaaatggtgacta

SEQ ID NO: 1525 - DNA, 332 bp, Lilium asiatic
  Clone ID: LIB3229-029-P1-K1-C5
gaaacatctcaagttactaaatctgaggtggaataagctacaagatgccatccctcctgaaatcggcgagctaaagaaactgactcacttgtacctcagtttcaataatttcaaaggagaaattccttcagaactttcaaatttaccggaacttcgatatctttatcttcatgaaaaccgctttaccggaaaagttcctcccgaattggggaatcttaaaaatctccggcatcttgatgttggcaacaaccacttgactggaacgttgagggatctcatccgtaatggcgatggctttatttctctccgcaatttatacctaaacaataatc

SEQ ID NO: 1526 - DNA, 354 bp, Lilium asiatic
  Clone ID: LIB3229-029-P1-K1-C7
tgatgacaaacgaagacaactgcatatattgtctaaagcctacccccacaacgcaaatcctgaccgcccagtacagaaaaccattaacacccccttttcaattttacaatcaaaaagctctaattcaaattcaccacctactggaccttacaacacgccctttaagctttctttggcgtcttggtggctttcttgggagacttgggagtcttcttgggagattttgttgcagcagaatcacccttctcaagagtcttcttggggagcaggaccgggttgatgttggggatgacaccgccatgggagatggtgactccagcgagcagcttgcccagctcctggtcgttcctgaca

SEQ ID NO: 1527 - DNA, 384 bp, Lilium asiatic
  Clone ID: LIB3229-029-P1-K1-C8
accatatcttctctgaccacttccttgaggttcgatggagctattaatgttgatgtcacagaattccagaccaaccttgtgccttaccctcgaatccatttcatgctctcttcatacgcccctgttatctctgctgagaaagcataccatgagcagctctcagtaccagagatcacaaatgcagtgtttgagccctccagcatgatggccaaatgtgaccccaggcatggtaagtatatggcctgctgtttgatgtaccgtggagatgtagtgcccaaggatgtgaacgctgcggtggccacaattaaaaccaaaaggaccgtccaatttgttgactggtgccctactggtttcaagtgtggcatcaattaccagcctccaact

SEQ ID NO: 1528 - DNA, 333 bp, Lilium asiatic
  Clone ID: LIB3229-029-P1-K1-D1
catgaaaagcattgtaaccagacgcagcatccaaaacaaacatcttgcagtataatcttaataacaagttttcatacaaacaataacaatacccttaaaacaaatcattcttgaaaataaaaacacacgaagttcattggatatattgagagagattaaacctctttcatgctcacatcatgcatccacagtcgtaggcttataatcgatgacgatgactttatcaagcgcaggtaagaacacattggagaattcgacatgagctggatgtacaacgtactcagcgatgccttccacactttcaaaagttgattcaaatacatgggtgaaacc

SEQ ID NO: 1529 - DNA, 384 bp, Lilium asiatic
  Clone ID: LIB3229-029-P1-K1-D10
ggagcatcacgggactgcgcagtatgcacctccacttctcatggagacgctcgatggccaaggagagatgcagagactcactcaaggatcttgagcaggtgtaggagttctatttcaacctgcccaagggcgagcaatttgtaaaccattcacctgactgctcagcgatccctcaacaagcttcgtataattcatcgaaggtttttgcatcatcaacagaggtttttgcaagcatcggtttactgagactagaaaatctctctttagaattgtagttcctgtaactgtatcagaatttttagtgtgccctctttttttttcttggtcaccctgtccggagaggcaataattgaacttgagggatatgatttgcctctagaaatc

SEQ ID NO: 1530 - DNA, 276 bp, Lilium asiatic
  Clone ID: LIB3229-029-P1-K1-D11
ggggcgcgacggcaatggttcattaaactcggccatgctcattgtgacgtagggcgaccatatgcagcattttatctctagaccatctaacagggcgattgtaccagcttccataaggatctcaagtgggccacaccttagctaacccatgacgctgcatactgtagaaccggtgaaattggatcttctagtattcgaatgcgtaggttgactcaatctaaaaattgaggatcttacgcatcatctatcatagtctcaatttgataaagatgccaa

SEQ ID NO: 1531 - DNA, 384 bp, Lilium asiatic
  Clone ID: LIB3229-029-P1-K1-D12
gataatgtgaaagctaagatccaggataaggaagggatccctcctgaccagcagaggcttatctttgctgggaagcagctggaggatggtcgcacacttgctgattacaatattcagaaggagtcgacactgcacctagtccttcgtctccgtggtggccagtaattccttagtctgatgcttcctttctatgtttgtatggtggattggtctgtttgaactcctatcgtggcagtactctttagttgtgtgcctgtggttgaataagtactttctatctggtggttgaaagtacctgctatctggttagtgtttgaaattcctcccctatttacttgtgttggattttggaacaagttatcaatctagtatcaaatttcggat

SEQ ID NO: 1532 - DNA, 393 bp, Lilium asiatic
  Clone ID: LIB3229-029-P1-K1-D3
gtctcttctatgctttacgagaaaagatttggtccatacttctgtcaaccagtaattgctggactaggagatgatgatgttccattcatttgtactatggattgtcttggtgccaaggagctcgcaaaagacttcgttgtttctggtacagccggggagtctctttatggtgcttgcgagtctatgtacaaggctgacatggaacctgaggagctatttgagactatatcgcaagcactgctagcttctgtcgatcgcgactgtttaagtggttggggaggccatgttcttcttgtgacaccaactgaagtgcgtgagagcatgttaaaggggaggatggattaaagttctttctgggcgaagttctttatgtgggctgcatttataaattac

SEQ ID NO: 1533 - DNA, 390 bp, Lilium asiatic
  Clone ID: LIB3229-029-P1-K1-D4
cttaaaacagtttgccgtggttttggctagcttgtgtgccgctgcggtgataggtagctgttgcaactttctcaccgtcatttacatcggatttgtttgtgctcacactttgccggttttctacgagagatacgaggatcaggttgacgacttcctttataacatttttgggcagcttcagaatcaataccagaagctggattccggtgtactgagcaaaatacccaaggcaaacctcaagtctaagaagtctctctagattcacctgtttctcatggtttatttatttgatggtcgggaactctctaaacgggtccctaacgataagaaagaggatgattatatatatatattgtccagctgctccgtaatgaatgtagtactcatgag

SEQ ID NO: 1534 - DNA, 388 bp, Lilium asiatic
  Clone ID: LIB3229-029-P1-K1-D5
cccacgcgtccgcggacgcgtgggcttgaggaagggggagagtgtaccgtatcctgatgttgaagcaataaaagcggaggcaagggaagaagcccagaaggagagtgaagctgaactgaacgatctgcttgtttgccttggtcaggagcagaccaaggtcgagaagctgagcacaaggctggcggagctgggtgaggatgttgacactctccttgatgggataggggatgatactggactaccagaggaaggcgatgatgatgatgaagatgacgacgaagagtgagctctagtattttctcttctgcctcctcagcccactgttgattgcatatcttcacacttaaggcttgagagtaggttgggcaagtttgctctaacagagcat

SEQ ID NO: 1535 - DNA, 362 bp, Lilium asiatic
  Clone ID: LIB3229-029-P1-K1-D8
ccacgcgtccgggtgatgctggcatgattaagatgattcccaccaagcctatggtagttgagactttctctgattatccaccccttggccgatttgctgttagggacatgcgccagactgttgctgttggagtcatcaagagtgtggagaagaaggatcctagtggtgccaaggttaccaagtctgctgtgaaaaagaaatgagggttctgttttcttaatagtagttaagcccagccaatttactgagtttattttgtacttgtcatgcgtcttgtttgtttcgtacttgccatgcgtcttgttttaacaagatgcttgataggttgatgagtttatgtgttgaatttacaagttggtctt

SEQ ID NO: 1536 - DNA, 384 bp, Lilium asiatic
  Clone ID: LIB3229-029-P1-K1-E11
aagttaagaaatataagatataaataaaagaagtataaaatgataagtaatagatatatactgataagttacctataaaagttaaaaaaaaaagtggtattattaaataagaaaaattaaaggtaaaaaaaaatattataataaagaaaatataaaaagaaagtagaataatgaaaaaagtaaaaaagagaaatctagaaaaagaaaaatataaaagaatgaaataaaagaatagaataataaagataaactaaggtaatataataattataaattaagaagaaaagtggttatttagtattattagatagtgtataaattatttactaatatttactaaattgtttaacattgtataatgtattaaatcctaaaatccataaa

SEQ ID NO: 1537 - DNA, 384 bp, Lilium asiatic
  Clone ID: LIB3229-029-P1-K1-E12
cgcgcatttgtgtattctgttgcccgcgtctgttacaacgggaaaattgatcggaaggattgggcacgagttatacttcttgctgccgaaaaggccactcaagtcgctcttcatgcaatccaatgccttggtggcaatgggtatgtgaacgagtactcaaccggtcgttttttaagagatgcaaaaccattttagattggtgctgcaactagttaggtaaggaggatgatcattggcagggagctctttaaacaagactaatagtgcagccctatttttgggaaaaaaaagttttgggcattatgatctgaatgagaagaacactctcactggaatgtcttaacaccctagtttgttttcttaatgagaatgtttatttattct

SEQ ID NO: 1538 - DNA, 392 bp, Lilium asiatic
  Clone ID: LIB3229-029-P1-K1-E2
tccagttctgcttgctgctgatttgaaaaagaagactgaaacccttgacaggttctgtaagccaattatgacaaaaccgaagccaaagccggctaagcctcagtcagctcctccggcagagtctcaggctcccacgcctgaaggctcttctcagcaacctgaaggggagcccaatgcaagtgatcatgtgccggagcctatggagaccgataaatcggagactggatctgagtctacagcgtaaaaaagggtcataaatatctgcatctataattatggcaagcctggagcccttggtatgtttcaactgtcaaccttggacaataggtttgataaggtgttgggagttgctctataggtgaacatgtttatttatgttaaaactatgaagt

SEQ ID NO: 1539 - DNA, 390 bp, Lilium asiatic
  Clone ID: LIB3229-029-P1-K1-E4
cggacgcgtgggttccgaccctctgccgccttcgagggcggagtctgaggccggactgattgtgctcaacgacccaatgcggcccttgccgacgtcgactacacgttatatgtccaaggccgtcccgacccggccgaccttcctcgttgacacactcgccatagtccggggtatggaggcgcgtgggattgaatcggagcatgccgaggccataacggcggcaatcacgaaggtgatgaatgatttgctggagagtgtcggcaagtcttttgtgtcccaggatcagatgcagaagagtgagaatacttgggatgcggacttttctaaatttaagtcggagatctcccaggaacaacatttctttccattgcaacgatcgagcaacaaact

SEQ ID NO: 1540 - DNA, 391 bp, Lilium asiatic
  unsure (1)..(391): unsure at all n locations
  Clone ID: LIB3229-029-P1-K1-E5
ggctctttgaaattggagctggggtctgggacgggtgattgaacattggattgaattgtcttggttgattcctttttggcttggtactttgggagtggatatatagaaggagcgaagcgaaaggaacagcagccctgtacggctctcgaagttccttggccgtgataaagatgatgcagtccgccgcagtgccgtttctggtaaaaaggtacgaatgtttcccttctttttccagaattcctggagctctgccattgtcattggagttttttctttcgtacatagattttattgaagcttgataaatcgaaggaagacaagttggctgaaaccaaccgcaatgagttactgaagnttttgaactctagctatgattgaactgtggcgatga

SEQ ID NO: 1541 - DNA, 393 bp, Lilium asiatic
  Clone ID: LIB3229-029-P1-K1-E6
gagcatttgtgtattctgttgcccgggactgtgacaacgggaaaattgatcggaaggattgtgcaggagttatacttcttgctgccgaaaaggccactcaagtcgctcttcaggcaatccagtgccttggtggcaatgggtatgtgaacgagtactcaaccggtcgtcttttaagagatgcaaaactatttgagattggtgctggaactagtgaggtaaggaggatgatcattggcagggagctctttaaacaagactaatagtgcagcccttttggtgggaaaaaaatgttctggggcattaggatctgaatgagatgtacactctactggtatgtatcaacaccctagtttctatccttaaggtgattgtttcttattctaatacattcaa

SEQ ID NO: 1542 - DNA, 385 bp, Lilium asiatic
  Clone ID: LIB3229-029-P1-K1-E7
atttcaatccagccatggctggattgttggggcagaatgcggggcttgggatgatgaatccggccactgggatggttccaaacatgggtggagcaactcagtctccttatgggattgggctcgggagaggtggcgcaggggttaactatgggaatccaatgactttgcaagggcttggggctcgtcaggatggacgactatcttcgatgcccggaaatggatcagttggcactggcttgccaccctactatgggcgctaggtatctcatttctgatggttgatttctcagattatgttacctgcttcactttttaagctccggtctcagtttattggaactattttgtagttgtgtgttgttagtactttattcccttgcttcac

SEQ ID NO: 1543 - DNA, 375 bp, Lilium asiatic
  Clone ID: LIB3229-029-P1-K1-E8
cccacgcgtccgcggacgcgtgggatccgatgtataatacctccccttagaaattataatccagtaaacagacttctaattacagaagtatcttccccaccaattatattattattgaggtgtttgattattctccaccacttatagctataatggcagacttctaattacagaagtatcttccccaccaattatattattattgaggtgtttgattattctccaccacttatagctataatggcagtctgctaggattaatgtaaaaaaaaaaagcctctaacccatgttataatttaaccgacaaaccttgtacaaaaaattttaatataaatttaaaagattataaggggcgggcgctcttgaggatccaag

SEQ ID NO: 1544 - DNA, 391 bp, Lilium asiatic
  Clone ID: LIB3229-029-P1-K1-F1
cccacgcgtccggaaacaccgccaccccgatgaatggcatcttactcactaataagacccacacaaacaccactcaatcaaacaagaaaagaagaagtaaaatgactctcatcactgaagagctcaaggccaatgctgaagtcttctacggcgacgagctcggccaagaaaaaaccaagctcctcctcgaagaagtcggactcccctgcggccttctccctctcaaagacatcatcgagtgcgggtatgtcgagcagaccggcttcgtatggctcaagcagaagaagaagatccagcattgcttcgaaaagatcggaaaacaggtgacatatgatactgagatcactgcgtacattgagaagctgaagatcaagaaactgaccggcgtgaa

SEQ ID NO: 1545 - DNA, 387 bp, Lilium asiatic
  Clone ID: LIB3229-029-P1-K1-F10
cccacgcgttcgaaagattcaacaaaagacagaaacaaatccactatctgttttacgccaagcaatacgtggagtaactcccaatatagcagtaaaagcaagacgtgtaggcggatcgactcatcaagttcctattgaaataggatctacacaaggaaaggcacttgccattcgttggttattaggggcatcccgaaaacgcccgggtcgaaatatggctttcaaattaagttccgaattagtagatgctgccaaagggggtggcgacgccatacgcaaaaaggaagagactcatagaatggcagaggcaaatagagcctttgcacattttcgttaatccatagatctatgtgtctatatagatctatggatccatacatctcgatc

SEQ ID NO: 1546 - DNA, 389 bp, Lilium asiatic
  Clone ID: LIB3229-029-P1-K1-F11
cccacgcgtccggacctacgttgatgagcacctgatgtgcgagatcgacggccagatcctcaccgccgccgccatcgtcggccacgacggcagcgtctgggctcagagcgagaacttcccgcagatcaagcctgaggaaatagctggcattatcaaggactttgaagaaccaggttctcttgcgccaactggtctatacattggcagtacaaagtacatggtgatccaaggtgaaccgggggctgttattcgagggaaaaagggttctgggggtgttactatcaagaagactaatctggctctcgtcatcggtatctatgatgaaccaatgacacctggacagtgcaacatgattgtcgagaggcttggcgactatctcattgaacaaa

SEQ ID NO: 1547 - DNA, 389 bp, Lilium asiatic
  Clone ID: LIB3229-029-P1-K1-F12
cccacgcgtccgccaagaacctcaagcttgccattcacgaggactcccagaacaggactaagcttgctgagttgttgaggtatcactcgaccaagagcggtgaagagatgaccagcctcaaggactatgttacaaggatgaaggaggggcagaacgagatattctacatcactggtgagagcaagaaggctgttgagaactctcctttcctcgagaggctgaagaagaagggctatgaggtgctctacatggttgatgctattgatgagtattctgttggtcagttgaaggagtttgaggggaagaagttagtctctgcaacgaaggagggacttaagcttgatgagagcgaggatgagaagaagaagaaggaagccctgaaagagaag

SEQ ID NO: 1548 - DNA, 382 bp, Lilium asiatic
  Clone ID: LIB3229-029-P1-K1-F2
gccaagtttgggtgccgccggtctgccgggatcatcagcgagaagtttcccatctctgagtttgcatgccaaggttgggtgccgtgccgggatcatcagcgagaagtttcccatctttgagatctgcttgctggataaaatttaccaagattccgaagatcaaaatccagtagaatcgaaggatcttgggaacgccggtgcagagtaaaattgacgaaacttgttgtgttatctctgcatgagatccttctcttataaggtggacgtgtgtagcctagctgtagcaagagagagctgaggtggtggcgagttgcttaaaggcagtagtggtttcctattctaccttctatttccttttgaattttttccttcttagatagtc

SEQ ID NO: 1549 - DNA, 389 bp, Lilium asiatic
  Clone ID: LIB3229-029-P1-K1-F3
gcaccaaatccgtgtcccgttcagtgaaagctggtctccagttccccgtgggccgcatcggccgctacctcaggaagggccgctacgcgcagcgtgttggctctggtgcccctgtttaccttgcctctgttctggagtatcttgctgctgagctgctggagcttgctggaaatgcggccaaggataacaagaagaacaggatcatacctcggcatattcagttggcggtgaggaatgatgaggagcttggccggttgctgcttggggtgacgattgctcatggtggtgtggtgccaaatatccattctgtgttgctgcccaagaagcaccaggacaagtctaagaagggggacgataagaatactgcttctcaggaattctaggttttt

SEQ ID NO: 1550 - DNA, 394 bp, Lilium asiatic
  Clone ID: LIB3229-029-P1-K1-F6
ctgagaaattaatgagcaatattctcttcaagaagcttggggattatgagatatcatggattgatgcagaagttggaaagacggatgatgtgctttctctgctccctctctcatctactcctccaacccataaatctgttcttgtgggagatctaaaattggcagacttaagcagtttcttgccagcaaaggcatccaggtagaaatttccggtggtgccttgcgttgcggtgagtccatcacattgcgcaaggttggggactccagccaaaagggtggtactggtgctcaacaagtggtcatcgaaggtccattatccgaagaatactacaagatccgagagcttctttactcacagttctacttgctctagaaatgcaggaatgctatttgt

SEQ ID NO: 1551 - DNA, 393 bp, Lilium asiatic
  Clone ID: LIB3229-029-P1-K1-F7
gaaacaccgccaccccgatgaatggcatcttactcactaataagacccacacaaacaccactcaatcaaacaagaaaagaagaagtaaaatgactctcatcactgaagagctcaaggccaatgctgaagtcttctacggcgacgagctcggccaagaaaaaaccaagctcctcctcgaagaagtcggactcccctgcggccttctccctctcaaagacatcatcgagtgcgggtatgtcgagcagaccggcttcgtatggctcaagcagaagaagaagatccagcattgcttcgaaaagatcggaaaacaggtgacatatgatactgagatcactgcgtacattgagaagctgaagatcaagaaactgaccggcgtgaaggcgaaggagctcc

SEQ ID NO: 1552 - DNA, 196 bp, Lilium asiatic
  Clone ID: LIB3229-029-P1-K1-F8
tgttcttctatttatgtccgagtttcttaagaactgcaagagtctagttggtaatgcttgtttttgtttgtcgaactttcgtgttgttaggtcagtggttttgatcaaactatttgctttgctgctctatttggtcttttgttatgaatatttgatttgctacctgttaatttatctttggtactagcttcatttt

SEQ ID NO: 1553 - DNA, 333 bp, Lilium asiatic
  Clone ID: LIB3229-029-P1-K1-F9
ttagttttggagggtcggatgagacgtagagctaacacatcaggtgtagaattggaagaggtttagttttctatagcatcaaaaactgttaagtgcacaagctctccctctgaagtcaaagagggtgtttacttgaagagggtctactgagtttatatcagttaggcgtgaacttgataggaaggaagatgttagcccatatttggcccggttacttttaactgctgcttggcattgatatttaatgtttgttcttcgaattatcttaagagttttttaagctacattgagttcccggtatactttcaactattttgagctattgtttttacc

SEQ ID NO: 1554 - DNA, 392 bp, Lilium asiatic
  unsure (1)..(392): unsure at all n locations
  Clone ID: LIB3229-029-P1-K1-G1
catcaatcatgtcaggccgtggcaagggagggaaggggctcggcaagggcggcgccaagcgccaccgtagggtgctgcgggacaacatccagggcatcaccaagccggccatccgccgcctggctcggcggngtggagtgaagaggatcagcggcctcatctacgaggagaccagaggcgtgctgaagatctttctggagaacgtcatccgcgatgccgtgacctacactgagcatgcgcgccgcaagacggtgacggcgatggatgtggtgtatgctctcaagcgccagggccgcaccctctatggctntgggggttgatcttgttctcctgtcctgggtctctgtttgtttattttgggtttgtatggtagntatgttattcatatttct

SEQ ID NO: 1555 - DNA, 254 bp, Lilium asiatic
  Clone ID: LIB3229-029-P1-K1-G12
ccccacgcggtcgcccacgcgttcgcccacgggttcgcccacccgttcgcccacccgttccgggaccccggggggggttggccgggatttcaaaggggggggggggggcccttgggaaccctggccggcttttgtttgggggtaaacctggtgcaaaaaaagaagggccggaaaaagggtttaggattgtttttaaacaagggcccccggggggggagaccgtgaaaacaatctcaaataaacactcttggggg

SEQ ID NO: 1556 - DNA, 368 bp, Lilium asiatic
  Clone ID: LIB3229-029-P1-K1-G2
catcaatcatgtcaggccgtggcaagggagggaaggggctcggcatgggcggcgccaagcgccaccgtaaggtgctgcgggacaacatccagggcatcaccaagccggccatccgccgcctggctcggcggggtggagtgaaaaggatcagcggccttatctactaggagaccagaggcgtgctgaagatctttctggagaacgtcatccgcgatgccgtgacctacactgagcatgcgcgccgcaagacggtgacggcgatggatgtggtgtatgctctcaagcgccagggccgcaccctctatggctttgggggttgattcttgttctcctgtcctgcgtctctgtttgtttatcttgagtttgta

SEQ ID NO: 1557 - DNA, 293 bp, Lilium asiatic
  Clone ID: LIB3229-029-P1-K1-G4
tcgaccactcgtccgtcaagaacctcaagcttgccattcacgaggactcccagaacaggactaagcttgctgagttggtgaggtatcactcgaccaaaagcggtgaagagatgaccagcctcaaggactatgtttcaagggtgaaggaggggcagaacgagatattctacatcactggtgagagcaagaaagctgttgagaactcttctttccttttgaggctgaagaagaagggctatgaggtgctctacatggttgatgctattgatgagtattctgttggtcagtttaag

SEQ ID NO: 1558 - DNA, 375 bp, Lilium asiatic
  Clone ID: LIB3229-029-P1-K1-G6
cctcatcccgcgctcgccttctctcccagttatcaaaatgtacactgcaaggaggaaaatccagaaggacaagggtgtggagcccactgagtttgaggactctgttgctcaagctttctttgatttggagaattctaatagcgagctgaagagtgaattgaaagacctgtacattaactcagcagttcaactggatgtagccaacaacaagaaggctgtagttgttcacgtgccctacagacttcggaagtcgtataggaagattcatgtgaggcttgtcagggaactagagaagaagttcagtggcaaggaggtgatcgtgattgccactcggaggatagtgaggccgccaaagaaaggctctgctgttgtgcg

SEQ ID NO: 1559 - DNA, 263 bp, Lilium asiatic
  Clone ID: LIB3229-029-P1-K1-G8
ccacgcgtccggcttgtgaatacaatatttcttagatcttcaagagcgaacatcatgtcttatactatactagggttttttattgggtgcctaaataatgataaatgatgatttaaaatagttgtccatagattaatcatgcctcttttgataataatcaattataaatggattaaactaggaaagtcagttatattcacactaaacgaactattacaacattgatgataacaaatctagatacacacataattatatattag

SEQ ID NO: 1560 - DNA, 392 bp, Lilium asiatic
  Clone ID: LIB3229-029-P1-K1-H10
cgaaaaactactaaatcagggtcgaagattattcagtcagatttggagtgggtttgagctagggctgtacctccttctctgcgctgcattgggaggtcttctcagctgtctttatgtttcttgattggctttgatgccatggaagttggtgcctctctaagctgaagggaggccatataacattcaatgaaagcaacatgatcggcgtagacggtgatcgcatatgaaagggtgatattatcttgttgtatttaacatgattccgagcattactatatcgtatatctctgtatttatagttcttttggttatatgcatattatgagaacatgtcaggaaaagaggctaacatgtgtattttaaaatgattttagagaagaacttcaaagatc

SEQ ID NO: 1561 - DNA, 397 bp, Lilium asiatic
  Clone ID: LIB3229-029-P1-K1-H11
cagggaagttccctacactggtgactcatcaagaatctcttgagtcaaaggtgaatgagaccaaagcaatggttaagttccagctgaagaaagttctttgcatgggtgttgcagtagggaatcttggaatggaagacaagcagatctttcaaaacgtgcagctcagtgtcaattttcttgtttccttgctgaagaagaattggcaaaacgtgaggtgcctgtacctgaagagcaccatggggaagcctgtccgagtgttctaagcagagttcctttctcatagtccttcaaagaggttcaagttgtaggaaatacctcagtctgttctgtctgcagggcgtgatttcaaagttttgtttattgagctgttggttctgttagactctcatctagtttt

SEQ ID NO: 1562 - DNA, 192 bp, Lilium asiatic
  Clone ID: LIB3229-029-P1-K1-H12
tcgtctacttgttctacaagatcgtgactcattccatatacgtggactcccagaacagggctaaccttgctgtgttgttgatgtatcactcgaccaatatctgcgaagagatgaccatcctcaatgactatgttgcaaggatgaaggaggttcagaacgagatattctacatcaatggtgagagctcttagg

SEQ ID NO: 1563 - DNA, 373 bp, Lilium asiatic
  Clone ID: LIB3229-029-P1-K1-H5
cctctctctgcaacaatggcttcttcctctctcctcctcttactcgctgccaccatcactcttgctctagtggtgcaagcccagctggtcgccgacggcagcctccagctaagccccgacgccatggactggtcctcagtcagctccgtctcctacccattcatcgccgaagaagacaacgctgacatcttcggcgccgatgaagaggcgacggacaacaggaggtcactgctctggtacggtggtcaccgacattactacatctcctatggcgctctggcggcgaatcggatcccatgcccgccgcgctccggcaggtcgtactacaccaactactgctaccacacccgcggccatgtcaacccttactccc

SEQ ID NO: 1564 - DNA, 195 bp, Lilium asiatic
  Clone ID: LIB3229-030-P1-K1-A1
caagtctccaaagaaagctgccaaaaccccaaagaaagcttaaaagggcatcctgtaagctccagtaggaggtgaattcgaattagggcttttggattgtaaaattgagagggggagttagtgattttctgtactgggcggtcaggatttgctgtgtcttgcttttagacaatatatccagttgtcttcgttgtc

SEQ ID NO: 1565 - DNA, 426 bp, Lilium asiatic
  unsure (1)..(426): unsure at all n locations
  Clone ID: LIB3229-030-P1-K1-A10
atcctgacatcttttgagatgtccgacttactcccctgcttatggtttgcagtatgggtagtggtagaaggcatgctttggaggaatggatgggtaaaatgctccctcacattgatctattcagaagtgctcctgtagcagcttttcttgaattggaagccgccgcaaggacttgaatcagcagtctctggaggcaagattgtcgcttgatgcttttgctaaagcctcttcgcttctcgttagacatagtccaggtgcttatgatcgtgatggttccactgttgcatccatgtctaactcaataacttcagatgttggtagtgatagcgcttatgagacgtcagacctggggactcctaggcaaggcaagagtcatataagtgaaatcagtagagaaaatttagcatcangtgatggtcaagtagg

SEQ ID NO: 1566 - DNA, 409 bp, Lilium asiatic
  Clone ID: LIB3229-030-P1-K1-A11
ctttagttccgttatcttatatcttaagtgtctcaaaatagatattttatgttacataatgaatagaaatcaaatcagtattcttctttatccttcgggtaatcggcctttaacggtttttgtttgtgacacatggataaaacttaatataacgaagatatgtggataaaattaattatgttgcatatggatgtaaggattattaagatccgagttaagtgtagcagtttaagattagaatcaacggagtgaattataaaattgtttcgaacaaacaatttcagattaggattcgtttatctctaacttgaaagtaagaaggtttgaattgtggtttagtttggagtaggcgggtaaaattagttttggttcaaggtttgttggaacataataaattcggaatcttggg

SEQ ID NO: 1567 - DNA, 413 bp, Lilium asiatic
  Clone ID: LIB3229-030-P1-K1-A12
ctttagttccgttatcttatatcttatgtgtctcaaaatagatattggatgttacataatgaatagaaatcaaatcagtattcttctttatccttcgggtaatcggcctttaacggtttttgtttgtgacacatggataaaacttaatataacgaagatatgtggataaaattaattatgttgcatatggatgtaaggattattaagatccgagttaagtgtagcagtttaagattagaatcaacggagtgaattataaaattgtttcgaacaaacaatttcagattaggattcgtttatctctaacttgaaagtaagaaggtttgaattgtggtttagtttggagtaggcgggtaaaaatagttttcgttcaaggtttgttggaacataataaattcggaatcttgggtttt

SEQ ID NO: 1568 - DNA, 373 bp, Lilium asiatic
  unsure (1)..(373): unsure at all n locations
  Clone ID: LIB3229-030-P1-K1-A3
ctcacgcgtncgccacgcgttcgctacgcgtccggttccctacctgcaagatttgatcacgcctaaaatataccaggagagtcacctcaatctcctcatcaataaccccttattaattttgagttctaatgaactattccatggatctgatcaattacttcgaaggccatcatcgaaggatcaaatcaattacttctttctttgatttttttagatctcttagtctctctcctctttacctcagatattgtttatagattgaataatttccaatttgttttctctttatttcaggggtttgatcaaatgtcggaaggaggatcacagaagaagagatggtggatgagctttatagagccctggttacttggta

SEQ ID NO: 1569 - DNA, 406 bp, Lilium asiatic
  unsure (1)..(406): unsure at all n locations
  Clone ID: LIB3229-030-P1-K1-A4
actaaatccaccctaatctacgaaccatgtggtgaggaatggattcaacattgcacctgatctgttgctaatcacctcactaaggcacttgtcctcctaatggttgtcagcaattatatattaactgctttaccctcgtgtatagatccgtcaatggattcaacatggcatacaattcaaaattgcaacggtaaactttttgcggcagacattctacttgtgttgcaggaattctgatttaatagagactatagagcttgagaatcttttgataaatgcatgtataactatgcactctgctgcggcaaggaaagaaagcaaaggagctcatgctcgtgaagattntactgtcagatctattctggactggcatttcatctttaatatgctttatggtgtcattcac

SEQ ID NO: 1570 - DNA, 354 bp, Lilium asiatic
  Clone ID: LIB3229-030-P1-K1-A5
cttcaagttccctgttggccgcattactcgttttctgaagaaagggccgctatgctaagcgcgttggctctggagctcctgtctatcttgctgccgtccttgagtaccttgctgctgaggtgctggagctggcgggcaatgctgccaaagacaacaagaagtcccgaatcatcccgaggcacatctgccttgctgtcaagaacgatcaagagcttggcaagctgctcgccggagttaccatctcccatggcggtgtgatccccaacatcaaacccgtcctgctccctaagaaggctgctgagaaggctgattctgctgcaaccaaatctcccaagaagaccccagtctccaaga

SEQ ID NO: 1571 - DNA, 84 bp, Lilium asiatic
  Clone ID: LIB3229-030-P1-K1-A6
gcgaggggtcgttctagacgatccaagcttacttacgcgagcatgcgagctgatagttttgatatagtgtgatctaaattcaat

SEQ ID NO: 1572 - DNA, 425 bp, Lilium asiatic
  Clone ID: LIB3229-030-P1-K1-A7
cgcagtccagcttgcaaagcttgggaaccttcatgtgacggccacatgcggagcacgaaacatcaactttgtgaaggatctgggtgctgataaggtgcttgactacaagactcctgaaggggccagcttgaagagcccttctggcaggacctatgattcagttatacactgtacgaccggtattagttggtcgacatttgagccaaatctgagtcctaatgggaaggtgattgatattactcccagtccgtctactatattcagctatgttgtgaagaagctgacatgttcgaagaagcaaccggttccgctgctactgatacccaaagaggaggatttggggtttctggttgaactggtgaaggaggggaagctcaagacggtagtcgattccaggtttcctcttggtgatgcggaggcggctt

SEQ ID NO: 1573 - DNA, 423 bp, Lilium asiatic
  Clone ID: LIB3229-030-P1-K1-A8
cccacgcgtccgctgacatgcaaattgttccggcgggaaagagtgttgccccgcagtatgtggagatgaaggtgcccctatactcgtatggctgcgagaacaaggtcaagaaggcattggctaatttgagaggaattcattctgtggaagtagactaccatctccagaaggtgacagtgtgggggatctgcaaccgggacgatgtgctagcgaccatcaggaggaagaggagggaagctcggttttggaatgaggcggagaacgaggttgtgattgataagagcgaggagcaagccgaagcaccgaaagctaggaaagttgccatcctcagcagatttaagttcaagagatcttggaagaagctgtttcctttggttctggttaggtaaccacttaagtctcataccttgagcttttgggaaa

SEQ ID NO: 1574 - DNA, 395 bp, Lilium asiatic
  Clone ID: LIB3229-030-P1-K1-A9
gcgtgattctggagcactcctagtttttgatgaggtacaatgtgggttaggccgaacaggccgtctctgggcccatgaagcttacggtgtgacacccgatatcatgacgctcgccaaacctctcgccggaggcctgccgattggcgctgtactgatgactgagaaggtggcttctgcaatgagatatggagaccatgggagcactttcgctggtggggctcttgtatgtcaagcggcccttgcggtgctggacaagataaatgatcccagcttcctgagcagtgtaaccgctaaaggtctttatctgaaacagcttcttattgagaagctgggtagcaacccccatgtgaaggaagtccgggggtttgggctactggttggggttgagctggatg

SEQ ID NO: 1575 - DNA, 408 bp, Lilium asiatic
  unsure (1)..(408): unsure at all n locations
  Clone ID: LIB3229-030-P1-K1-B1
gtcgatgaagggtttgctctcccttgtgctggctcttgcactggctcaggcctgtgcgaggagcactccaggtcaagtcagtgtcagcacaaaccacgctgacagcgccgctgccggcgttggtgatcaaaagaactttttctatgctggaggcattggtgggattgctggcgggggtgttcccggactcggctttggcggaggtgttcccgtcgttggtgctggtgttggtggcttgggtgggctcggtggtggcattggaggagccagcggcctcggngctgggtgccgcagtggctttggcggtggtgcangtggtggcttactaccatgagtggggtgtgggttagttacgcgagtaatgcatgcatgcagtaggttgttgcaagggtcgtggttgttagggtt

SEQ ID NO: 1576 - DNA, 422 bp, Lilium asiatic
  Clone ID: LIB3229-030-P1-K1-B10
cccacgcgtccgctggggcggccgatgctggctctggtttcgttgtcggagagcattcttgataagctgccgaaagcttggttcatttacttatttattggtgttggggttattctcttcgtaatatcattctttggctgtattggtgcagtaacgagggctggttgctgcctgtcttgttatgctttcttggtgatcttgttgatcctcattgagctaggagctgctgctttcatattcttcgaccatagttggaaagatgtgattccggctgacaaaactggggactttgacatgatatataattttctggaggcaaactggaagattgcaaaatgggttgctctgggtgtgatcatattggaggcattagtattcctgctagctattctggtgagagcagcaaataaacctgcggacta

SEQ ID NO: 1577 - DNA, 425 bp, Lilium asiatic
  unsure (1)..(425): unsure at all n locations
  Clone ID: LIB3229-030-P1-K1-B12
cggaagaggaaggttgagctgctgattgaagctttcgaaaccatcatgccgctaccggtttatgaagcacctctacatggcatatcaggttttacacattcaaggccaatgcaggcatgcagttaacagattctgagccaatggatggaagtgatctgaaagtcgacagagggtgcagttcaacctgggaactacataacgttatcttacaactagttaagtttatcacaagcaactgttgtttatcaatataacactatccatgtgtggtgttagtgtatgattaattgagtgtgttatctgtaatgactaatggaacatggtgtgtttactgttttattaaagagatagcttgaactgtaatgactaatggaacatggtgtgtttactattttattcaagagatggcatntaagcttttatgc

SEQ ID NO: 1578 - DNA, 429 bp, Lilium asiatic
  Clone ID: LIB3229-030-P1-K1-B2
ggcaaaacttgatggcaatactaaactgcttgatttcaccgagaagctagaggctgcatgcataggaactgtggaggctggaaagatgacaaaagatcttgcactcatcattcatggatccaagatgacaagggagcattatctgaacactgaggagtttattgatgcagtggccgacgagctgaaagcaagactctccagcaattgatgattgctgagaaggttgggatgcaggtttacttggtagggtggagctattcaaaagaattttgtgctttcaatgcaattttataaactgttcaagtctagcttttatagatgatattgagtaataattttgataaactcatgaacttccctggcttttcattaaagcagttcaatcattgaagcatttcactaatgggattttttttgtcaaacacataa

SEQ ID NO: 1579 - DNA, 378 bp, Lilium asiatic
  Clone ID: LIB3229-030-P1-K1-B3
ggcaaaacttgatggcaatactaatctgcttgattttaccgagaagctagacgctgcatgcgtgaggaactgttgaggctggaaagatgacaaaagatcttgcactcatcattcatggatccaagatgacaagggagcattatctgaacactgacgagtttattgatgcagtggccgacgagctgaaagcaagactctccagcaattgatgattgctgagaaggttgggatgcaggtttacttggtagggtggagctattcaaaagaattttgtgctttcaatgcaattttataaactgttcaagtctagcttttatagatgatattgagtaataattttgataaactcatgaacttccctggcttttcattaaaaca

SEQ ID NO: 1580 - DNA, 408 bp, Lilium asiatic
  Clone ID: LIB3229-030-P1-K1-B4
cggacgcgtgggcaggaatgttgctgctggcatgacggggggtttggcttacattcttgacgaggatgacacgctcatctccaagataaacaaggagattgtaaagattcagagagtaaatgctccagcagggcagatgcagctaaaagccttgatagaagcccacgttgagaaaactgggagcgaaaagggtgctgccattttgaacgagtgggaagcgtatctgcccctattttggcaactggtgccccccagtgaagaagatagccctgaggcctgtgcagatttcgagaaagtcactgccagccggatcacattgcaatcagtctaagactatcgagaacttcgtagtaaaccggaatgactgcataaaaagggtgaggaaaactgcgactgcgcacatacatg

SEQ ID NO: 1581 - DNA, 115 bp, Lilium asiatic
  Clone ID: LIB3229-030-P1-K1-B6
catgaaattagctacaaattttgtaatggaatatcatcgtttacatcttgtacctttgcaattgagcttctccaacaaagctttgtaaataaatggataaaatcttctgtcgaaa

SEQ ID NO: 1582 - DNA, 168 bp, Lilium asiatic
  Clone ID: LIB3229-030-P1-K1-B8
gagcggccggtcatatatttacagggttacccacgcgagcatgcgatgacctaggtaacctatcatggttggttaatagaattcactgatcggggtgtgacaacataaagactggtaaaaccgtgtgacgaccctactatacagtcttgcaatagattgatgtatagg

SEQ ID NO: 1583 - DNA, 415 bp, Lilium asiatic
  Clone ID: LIB3229-030-P1-K1-C1
cgcgaccagaaaaaccctagcgcgccgctgcggagtctcctctcatctcgcgctcgcctcctctcccaggatgtcagaagcaccatttgtgtcgagggaaaggatacagaagtatcagcaaattttccagaatactcataagcacacgtacctgaaaggtcgttacgataaggtcacatccgtagctattcctgtcgctctggcaggctcctgcctgttcctcattggtcgtgggatctacaatctgtctcacgggatcggaaagaaggaatgaaatgctgccttttgttaaataaacagcatggattgtttcccatacaaacttgcttctttatcctcgattgggttgtagtttcaatctctctgctttagtttgcatattgacagtttgaacttttcataagtgttttgaatg

SEQ ID NO: 1584 - DNA, 429 bp, Lilium asiatic
  Clone ID: LIB3229-030-P1-K1-C11
agaaagtaagggaggaaaagcgaaaagcactacttgagatgaagactaaagagaggaaggtggattttgataaggactttgaatctatgcaacaactttcactgaagaaagcaaatgctgatgaagttttcatcaaattgggttctgacaaggatgggaaaaagaaggaaaatgcagatcgtgatgaaagagctaaaaaggtgagcatccagcagtttctgaagccctctgatggagagagatattacagccctggaggccgtggccgtggcaggggacgtggtggtgatcgtgcaccattcagaggtggttttggtggtggcggaagtaccgcccctgttgctgcaccaccaattgaagacccaggtcacttcccgactcttggtgggaaagtagtaagggatgtgtgctggtgcatgtgctggactt

SEQ ID NO: 1585 - DNA, 215 bp, Lilium asiatic
  Clone ID: LIB3229-030-P1-K1-C12
gggagatagtgacggggatggcgcgttgaatgagatggacttctgtgtgctcatgctgcggttgagtcctcatctcatggagggggcaaagcagtgggccgatgaggcattgctacaagcagttgaggagggattttatttctcatgttagatttcccttttaacttttcgttatttacttttctgttatatcattttgaatttttaggttgacc

SEQ ID NO: 1586 - DNA, 406 bp, Lilium asiatic
  Clone ID: LIB3229-030-P1-K1-C2
cgcgaccagaaaaaccctagcgcgcctttgcggtgtttcctctcatctcgcgctggcctcctgtcccaggatgtcagatgcaccatttgtgtcgagggaaaggatacagaagtatcagcaaattttccagaatactcataagcacacgtacctgaaaggtcgttacgataaggtcacatccgtagctattcctgtcgctctggcaggctcctgcctgttcctcattggtcgtgggatctacaatctgtctcacgggatcggaaagaaggaatgaaatgctgccttttgttaaataaacagcatggattgtttcccatacaaacttgcttctttatcctcgattggggcgtagtttcaatctctctgctttagtttgcatattgacagtttgaacttttcataagtg

SEQ ID NO: 1587 - DNA, 424 bp, Lilium asiatic
  Clone ID: LIB3229-030-P1-K1-C4
cggacgcgtgggcggacgcgtgggcggacgcgtggggcttctggaagagagaaatttgcatctgttccatctggtggtggtggtgtggctgtggcagtgtcggcaggtggtggtggtggtgcagctgcccctgcagcagctgctgctgagccgaagaaggaagagaaggtggaggagaaagaagaatctgatgatgatatgggttttagcttgtttgattaagtgctgcgcttttgatgggctagatggatcttaaattgtgtttgagacctatgtaggattatattgagcttttaattgtgtcagactgctttatgccatgactttttgttctgatgtcttttggtttcctatttccttgttgaactgggagaatgccctatttaaagttggttatggcaagtttttatattctctgtgtttc

SEQ ID NO: 1588 - DNA, 212 bp, Lilium asiatic
  Clone ID: LIB3229-030-P1-K1-C5
cggacgcgtgggcggacgcgtgggcgtacgcgtttggcttctggaagagagaaagttgcaggtgaaccatctggtggtggtggaaacacatgagcaagcgacgcaggttggagaaccggagcaactgcccctgcatcagctaaccctgatccgaaaaaagaaaaaaaagtggcggaaaacaaagaaaaagaagagcatatattattgaactg

SEQ ID NO: 1589 - DNA, 411 bp, Lilium asiatic
  Clone ID: LIB3229-030-P1-K1-C6
gtcagatgcattggactacctgtctccaaaatacctgaacaggactcttctggaattggcaagggtatccacagatggtcttgttatcttttctggttatcctggtcagcagaaagctaaagtctctgagctatcaaaatttggaaggccggccaaactacggagttcctcctggtggataaggtactttgttcagactcgcttagaagagaatgaagctgcggcaaagaagtttgagcaggccgccaagaagaggtcgtacaagccaaactgtcaagtttttcacctcacttcagaccattgatctcgtacaagcctaagtaccacagcttgtttggtcaatatttccacagcttgtttggtcaacatttccaattcctgttctgatggttcaaaaactttgctggcatg

SEQ ID NO: 1590 - DNA, 108 bp, Lilium asiatic
  Clone ID: LIB3229-030-P1-K1-C9
gaattctggagtattgttgggtttagatttggtactggtagttgatgtaatctgtggaaaaccatctgggttttgttgaatcaagtttatggagtgatggttgtgtct

SEQ ID NO: 1591 - DNA, 419 bp, Lilium asiatic
  unsure (1)..(419): unsure at all n locations
  Clone ID: LIB3229-030-P1-K1-D10
ccagacatgaatcttaaactacccactgctaaagattttatcacccgccgccgtccgatcacaaggatctatcatccaccaacaagctcttgcatcctgaggaatttggtgtcggacccactgaagctgggaccttgcaccaactccgaccgctggagctacacaccccagaagaatctgatgatcaacggcacctatttctgcatccaggccaccggactgggcaagccggtgaggctcggcatcatctgcacgccagaagaaacccaatgggaggtggctggaatttcggagagaacacatctatcgtccaagctagctgacggcactgcggtctgcttggatgtcgagcaaggcggaacaatcgtctctaacccatgcaaaaggctgggcagtgctgaagaagaggagnttgatag

SEQ ID NO: 1592 - DNA, 435 bp, Lilium asiatic
  Clone ID: LIB3229-030-P1-K1-D2
aattcctttccttgttgacttatctatcatcatcaatgccgagccgatcagcaggcccgataacacaggactgggatcctgtggtggtaagccgccggaagcccaaggcggcggacttgaaggatcctcgtgtggtgaaccaggcgctgcgatccggggcggtggtggagactgtgaagaagcatgaagccgggcataacaagaagatctctgcagcgcccgcagtgtatgcgcggaagctggatgagcggacagagccagcagcgctcgatcgggtggcggcggaggtgagattgtcaattcagaaggccaggttggcgaagaagatggggcaggcggagctggcgaagctgattaacgagcgggtgcaggtggtgcaggagtacgagaacggtaaggcggtgccgaatcaggcggtgcttgcgaagatggagc

SEQ ID NO: 1593 - DNA, 174 bp, Lilium asiatic
  Clone ID: LIB3229-030-P1-K1-D5
tcgggagcaagcggcaaagatcaaccgaggtcacaccgtcgctgtcgtcctcgacaacgacattattagcttagaggcgtgctgtcgttgaggagggaattgagtcgtcgtctacccgcagcggtggtggagagattattgcgggggcctgcaaaccgggtttcatgttggtgc

SEQ ID NO: 1594 - DNA, 299 bp, Lilium asiatic
  Clone ID: LIB3229-030-P1-K1-D6
ggagcaagcggcaaagatcaaccgagtcacaccgtcgctgtcgtcctcgacaacgacatcatcagctaagaggcgtgctgtcgttgaggagggaattgagtcgtcgtctaccggcagcggtggtggagagatgatggcgggggcgtgcaaacggtgtttcatgttggtgctggtgccgaagagtgagccgaggtgcccgaggtgtgactcgccggtgccggtgccggcgctgaagaccgcgctgattgatcttaactccaagcaagattaggtgttgaaatcttttggggggatgaggg

SEQ ID NO: 1595 - DNA, 301 bp, Lilium asiatic
  Clone ID: LIB3229-030-P1-K1-D7
agccgctcgaagaaaacaggaagctagaaaggcaatcggcgaaaccctaagatgagggcgaagtggaagaagaagcggatgaggaggctgaagaggaagcgccgaaagatgaggcagagatccaagtagttgccgctgcaggactgtaatgcatgcatcgtggcttactgttggattaagttggctcttttattgttaagtttggtgttttaggggactagactatctggttcttttttgtttaaattatgaagtttttaattctcagttaatctaaatcttggcacatgttttgggttag

SEQ ID NO: 1596 - DNA, 408 bp, Lilium asiatic
  Clone ID: LIB3229-030-P1-K1-D8
cccacgcgtccgctgagcccctgtctgtgtttgttgacacctatggcactggcaaaattcccgacagggagatattgaagattgtgaaggagacctttgacttccggcctgggatgatgaccatcaatcttgacctgaagaggggtggtaatgacaggtttctgaagacagctgcctatgggcatttcggtagggatgaccccgacttcacctgggaggtggttaagcctctcaagtgggagaagcctattgcttgagatttcagggaagccttaattaatatatagacaagcatctgcatctatatttgtaggaaactatttaatcgtttaatttgctgtggtctgttggatccattgatttagtttgatgttggtctagtgtgatgttaccttttattattcgtta

SEQ ID NO: 1597 - DNA, 328 bp, Lilium asiatic
  Clone ID: LIB3229-030-P1-K1-D9
gccacgcgtacgatgagctcctgtatgtgtgggacgacacctatgggactggctgaataaccgacagggagtatatggaagatagagaaagagacctttgacttgcggcctgggatgatgaccatcaatcttgacctgaagaggggtggtaatgacaggtttctgaagacagctgcctatgggcatttcggtagggatgaccccgacttcacctgcgaggtggttaagcctctcaagtgggagaagcctattgcttgagattttaaggaagccttaattaatatatagacaagcatctgcatttatatttgtaggaaactatttaatc

SEQ ID NO: 1598 - DNA, 431 bp, Lilium asiatic
  Clone ID: LIB3229-030-P1-K1-E1
ggggcctggatctggtctccttcatcagctggttttgcaagaggagaaggtagattcacataagacacggaattcaatagtttgcagtcaaaaaagctctattgcaaaagcaccatatgaggacattggagatgagaagacaatgttgaaggctaaaggcaccactagaaccttaaaagataattatgataatggcgtcgaggagagtgcaaggaagaagcggcataattcaacggtggaagggtcacgatgcagccgagtgaacgggcggggatggcggtgctgccaggagactatggtcgggtatgcactctgcgagcatcatctggggaaaggaagactgaggagcataagaaacctgcggggcagcaaagatcagtcggaatctatgaaagggaggcggaaggtaggaacgttgaaagctcggtcta

SEQ ID NO: 1599 - DNA, 369 bp, Lilium asiatic
  Clone ID: LIB3229-030-P1-K1-E11
gatttcgtccctctgaagctagtgtggcatcgacgaccccatgatccaatggttctcgtagacagtgggcggaacttttacgggcgtgcaccggctgtggtgtcgctttgtgtgcaggcaggtgcacgagtgcctgttaagtactctggcatgatgaaaatgctcggattgtcgaggagttgattcatatgctaaatttctggtgagagaaatgtgttttgatctgtatgctgaactgattcatatgctaaatttctggtgagagaaatgtattttgatctgtatgctgaacttgtggtgagagaaatgtattttggccggaaatcgacatttcgagattggttagctcagtatgtaattttgttttgt

SEQ ID NO: 1600 - DNA, 245 bp, Lilium asiatic
  Clone ID: LIB3229-030-P1-K1-E2
tggggcctggatctggtctccttcattttttggttttgcaagacgagaaggtaggttcacatgtgacacttaattcaattgtttgcaatcaaaaaagctctattgcaaaagcaccatatgaggacattggagatgagaagacaatgttgaaagcttaaggcaccactagaaccttaaaagataattattataatggcgtccaggagagtgcaaggaaaaagcggcataattcaacggtggaaggg

SEQ ID NO: 1601 - DNA, 376 bp, Lilium asiatic
  Clone ID: LIB3229-030-P1-K1-E3
tgtacgttgggtcttcatgatctcaggtcacgctttgggattattccccaggaaccagttctatttgaaggaacagtgcggagcaacattgacccaattggacagtattcagatgacgcgatatggcagagccttgagcgctgccaactcaaagatgtggtggccgcaaaaactgagaagctcgatgcattagtggtcgacaatggagagaattggagtgttggacagagacagcttctctgtctgggccgggttatgctgaagcacagcaaaattctgtttatggacgaagcaactgcctctgtggattcgcaaactgatggtgtgatccagaagattattcgagaagatttctcatcttgtacaattattagca

SEQ ID NO: 1602 - DNA, 433 bp, Lilium asiatic
  Clone ID: LIB3229-030-P1-K1-E4
ggagctgcaaatattgtgtgcagacagtatacaactgtggacaagcctgaagaagcaactgtgatagagatgaaagagccagtgtccttgacatttgctctgaggtacatgaactccttcaccaaagcaactcctttgtcgaacacggtgaccattagcctatcttcagagcttcctgtggttgttgagtacaagattgctgatatgggccatatcaggttctatttggcacccaagattgaggaggatgatgaggagatgaagccttgaagtttgatttatggtttactttgctatctcttgtttgagagtattgaggtgtaatggatctgttgaattttgagagttgatattatttgttaaaacatttatttgactctcctacttgtgtcttaagagcaaattttcattgtcatttgcaatgttcctgata

SEQ ID NO: 1603 - DNA, 419 bp, Lilium asiatic
  Clone ID: LIB3229-030-P1-K1-E8
gaacagttttgggttatcggtggcgtctccgcccatctctttgcagtattccaaggacttctcaaggttctcgcaggcattgacaccaatttcacggttacatcgaaggcaggagatgaagacggtgacttcactgagctatacatgttcaagtggacaacacttttgataccaccgaccacacttctcattgtcaacttggtgggcatggttgctgggatctcttatgccatcaacagcgggtaccagtcatgggggcctctgttcgggaagctcttcttctcattttgggtggtggtgcatctttaccccttcctcaagggtttgatggggcggcagaaccgaacaccaactattgtcgttgtctggtccatccttcttgcttccatcttttccttgctgtgggttcggatcgatcc

SEQ ID NO: 1604 - DNA, 273 bp, Lilium asiatic
  Clone ID: LIB3229-030-P1-K1-E9
ccggaaagtgagagtacctgatgagatccttctttctctatgcttctgtggtagtgaagtatatagggtccattgacatgagtgaatgctagcttagtgttttaatgtgtacttactgttgagtgtagtaatactcagcgttaagttatgatgcctgtttgtctttttataatacttttctgtcggtggtggtatatttgggccattggacctttgtgttttttttgtactggatagtattttgaaggcttatctatttgcaaacttttatgt

SEQ ID NO: 1605 - DNA, 420 bp, Lilium asiatic
  Clone ID: LIB3229-030-P1-K1-F10
tcgaaaaaaatatgtgactcattaacttatatgtgttctgtatgttggagcacagaggatcaatattatcgttttgtgattggaagagtatatatatatatataaaaggatttatgacatatatgaaaatgaaaattatattatgttattggtgtatcccttgagttttatcctgggatttcgcgatattgttgtatcccaatatctgagcagtattgtaaccagtatttgtacctaaccaaatcagtatcctggtttattactccgatgaactataaaacgcagtctcataataagtgattgacttcccagaatcccgtttatcctttcttgattgagtcaaccaacttatctcctaaggagcacaaacacatggaggttacttggccatttcgaaaatgacaaaccctgataactctt

SEQ ID NO: 1606 - DNA, 271 bp, Lilium asiatic
  Clone ID: LIB3229-030-P1-K1-F11
cccacgcgtccgcaaaggcccagaataaattcttctttgtgataatgtaatgtcaggatttcaacttcgttgtaaagttgaagacctgggaccaaattgttttgtattttgaattgctcaacccgtttatggttgtacttaatgtataataaagtcaagttaacttattatggaaatggttcatcttttgctttttagaagcgagagatgggaaggttgttattttggaccataatatcatgacccccacccccactcctgttattttcat

SEQ ID NO: 1607 - DNA, 399 bp, Lilium asiatic
  Clone ID: LIB3229-030-P1-K1-F12
gggaagaggaagtccagggcgaagccagctcctaagaagcgaatggacaagcttgatacagttttttgttgtcccttctgcaaccatgggagcagtgttgagtgtctcattgatatgaagaatctgattggagaggcccaatgcaggatttgccaagaaagtttcagcactacagtcacagggctgacggaggcgatagacatatatagcgaatggatagacgagtgtgagaaggtcaatacagtcgaagaagaatactaatttggcagccttgttggctgggtagtcacatgatgcatgttggccatcattgtcgcttgcttggagtgacttatataaattgtgttgatttaaagattaaagtttgcgtgtatgcgagacaacttaaaatatttctag

SEQ ID NO: 1608 - DNA, 418 bp, Lilium asiatic
  Clone ID: LIB3229-030-P1-K1-F4
atagctgtcatcacccaggttgtgatccggtggtggttgcgaaggatggaaaggtgacgctattccctgtgattcccctacccaaggaaaaattggtggacacgaacggagcaggtgatgcgttcgtgggaggatttttgtctcaattgatcaaggagaagagcattgaggatgcggtcaaagcgggttgctatgcggcaaatgttgttatccagaggtcaggctgcacatacccagagaagcctgacttcgagtagattctggcttggtggtggtggtgttaagagagtatgccagggagactgaattttgattcttgtttcgtatattaccgtaaattgtattgttatttattgcaacaactatagacatggcggcaagttttcctttttgggggtgttgaatcttattattttga

SEQ ID NO: 1609 - DNA, 386 bp, Lilium asiatic
  Clone ID: LIB3229-030-P1-K1-F6
aactataaaaatatgatatgtagaatcattaactttattgagaactgaatgtagggtcacagattatcaatattatcggtatgtgattggaagtgtatatatctctatataaagttatttctggcatatttggaaatgaaatttatattatgttattggtgtatgcgtggggttttatacagagctttcttgatatcgccgtatgccaatatctatgcttttttgtggccacgctcatgtacctaaccaggtcagtattctaaaacattactgcgaggaactatagggggcagccccataataagtgattgacttcccagccttctgtatatcctttgttgatagagaaaagcaactcctctactaacgtgcacaaacacatggaa

SEQ ID NO: 1610 - DNA, 431 bp, Lilium asiatic
  Clone ID: LIB3229-030-P1-K1-F7
gaaacaataatggttttaaacacgataactaagcatcacaaccataaaaccatggtaactaggcatcacaaccaaatggatcataccagaatccgctaatcagtttcctctaagagcaaacatacccctaattcatccatttaaatcctccaaagacagaagtaacacaagcagtagctttcatgtcacagcttatggatggttttcatgtcagcaacctccaggagagtgccagtctcgacatggtcccaccattttagcaggaagttatccacaaccagcctgaaccagggtgatagttttaccccatcctcgccagcatcagccttcctcagaagttctttcaattcaccccggttcacatacttcacatcagcaacttcatcagggtttggatgcagtttaacatcgtggacgatgaagagcagata

SEQ ID NO: 1611 - DNA, 429 bp, Lilium asiatic
  Clone ID: LIB3229-030-P1-K1-F8
cccacgcgtccggctctgctcctccgtctctcacctcaacttttctccactttctccctgaccacccgaccagctccgcctctttcccaactgctccgcccctgcctccaagactcccagcaagcgcccaaccatcgcgccagtggtccctccacactggaccacctcccagagaagaagagcagcatgcatgcaatccgagccgtcaactccgagatcaacgctgccgagcttccttactctatctctccttgttttctttttggattaaatctggagcttacaaatataactctccgtgcaggaatggtggagattgcttacacgcgcgagccagagctatcaagggaggagttgatcatgcatgcacgaaggcggagatggagggctctgatgatgtgaaggtacgaggagcagaggatcaagcag

SEQ ID NO: 1612 - DNA, 414 bp, Lilium asiatic
  unsure (1)..(414): unsure at all n locations
  Clone ID: LIB3229-030-P1-K1-F9
agagaaggttgagtgagtgggaatgagcaggtacgtcaacatgccgatctcaaggattgcgatcgggaatacgaacgaggcgactcaacctggcgcggtgaaggcggcgctggctgagtttatctcgacagtgatttttgtgtttgctgggcagggctccggcatagcttacaacaagctcaccgttgacggtgccgccacccccgctggcctcatcgcggcctctctcggccacgccttcgccctgttcgtcgctgtctccgtcggtgccaacatctccggcggccacgtcaacccggccgtcaccttcggtgcctgtcttggcggcaacatcaccctcatccgcggcatcctctactggatcgcccagctcctcggctccaccgtcgcctgcttactcctncgctacaccac

SEQ ID NO: 1613 - DNA, 334 bp, Lilium asiatic
  unsure (1)..(334): unsure at all n locations
  Clone ID: LIB3229-030-P1-K1-G1
gccggatggtttcgtattagcgggatacttgcacttcatgcaacataagaaaaaatgggacgaaacaataagcagggagagcaaatgttgacaaaacaaggaatggtggtacgggagtggacgtggaaaacacgtgaggagagactgtatgtacaaaaacaaatggagtgaatccccgagatgagaaagagtgatattatgaaagagaggagagctagtngaccaaaacgaaaggacgaccacctagtggtcaaaaaagatggtcgaatatgtgttagaatattgcatgagctaaggtcattgcgcaacgccagacacatgcagtcacagcact

SEQ ID NO: 1614 - DNA, 331 bp, Lilium asiatic
  Clone ID: LIB3229-030-P1-K1-G10
gccacgcgtccgaatgggttctgttgtgtctgtctactgacattgccgagcattgtcgcactgttctagttaacacaatcaacatacctgtgtactgaactgtgccaatagcaggcgaagtgttaaaaacggcagagtctgaagaagactaacatggaggggcgcaagtgagccagagtgataatagctgctgtatgggagttattcatataagatatataattgaaagagttatgggcattgtggatgaattacagtggtgtgatctcaccgatgaaggtgactcaaagaggacgtgtatggcgatgatggatatgtagagagtgaacca

SEQ ID NO: 1615 - DNA, 286 bp, Lilium asiatic
  Clone ID: LIB3229-030-P1-K1-G11
cagttcttgaaggttttgtaatcctgagtagaaaacccagactaccgtgaagacaactgagtagggttttgtaatcctttgagaaaacccagattactgaggaaaactgagttcaatgggtttaacagtgcttgttcacagtactatcttgtctgcacctccaagatcaatgcttttctcgtagtaaaatttacatagctcttttgacctgttacatccattgttatttacgactgcgtagagcgtgtctaaaacatgaaaaaaataatatcatttgtttatttgt

SEQ ID NO: 1616 - DNA, 341 bp, Lilium asiatic
  Clone ID: LIB3229-030-P1-K1-G12
gaaaaagaaaacaatactttgcattatctgttgacacagtctgcagaaacccaaggaaaattaatagagcaacgtgatgctgaagtcgctcatcttacgttgcagcttgagaagaacgttcatgagctgcgaacttttgatgagcaaaatgccgaattgttccgatttacaaaaatgatttcggatctagaaacagaaaacaatagtttgcatcagcttctgacacagtctgaagaaagccaacgaaagttaagagagcaacatgaggctgaagttactgatcttacgcggcagctggagaagaagggtcatgagctggtaacttttgatgaacaaaatgc

SEQ ID NO: 1617 - DNA, 410 bp, Lilium asiatic
  Clone ID: LIB3229-030-P1-K1-G2
cccacgcgtccggaacaaggaagtcggcacgcccaaaaaggcactagtaagagaaagaaaacggacttcatccgctaaagtggaatctgcaaagccgaaataccttaaagatgtcgacagaaggatttccaaagcagaaaagaatgccacttctaccgaagcccgggaatcgatgtccactgtacaaccaatagcatcatcgaagaaaaggaagttccaaactggtgctgtttcagaacagcaaaatgcaaacaagaagaagaaaaagaataaatcttctggaggggctgcagtggataaacttgacatgctaatagaaaaatatcggtccagattttcacagggcagtttgaaccagagcaaagatgctgcagattctggtcgacgagaaatcaggagatggttcgagt

SEQ ID NO: 1618 - DNA, 228 bp, Lilium asiatic
  unsure (1)..(228): unsure at all n locations
  Clone ID: LIB3229-030-P1-K1-G3
cccacacgtacggaacaaggaagtctgtactcccttaaagccactaataaaagagggaaagcggactttattccggtgttttggaatctncaaaacccaaataccttaaaaatttctacagaacgatttccacaccacaaaagaatgccacttctacccaaccccgggaatcgatttccactgtacaaccaatagcattatcgaataaaaagaaattccaaactgccg

SEQ ID NO: 1619 - DNA, 215 bp, Lilium asiatic
  Clone ID: LIB3229-030-P1-K1-G5
ggatccagacctctcggaggtgatttatttttcttgttgtaccggccgagacgggcagactgctgagccattttcatcaagaggaccatcattaagctgtatatggattttaagactgatcgagcagtatgtactttgtagctgctataaatatgtttcgatttctgatcgaaacttatgttatttcaatttcccgttgttgaatcttgctttat

SEQ ID NO: 1620 - DNA, 413 bp, Lilium asiatic
  Clone ID: LIB3229-030-P1-K1-G6
cccacgcgtccggctggattctggagggactgtctactgccattgccaagtattgccccaatgttctagttaacacgatcaacatccctgtgtactcaactgtgccaattgcggcagaagtgttaaaaaaggcagagtctgaagaagactaacatggaggggcgcaagtgagccagggtgtgaatagcttctttatgggagttattcagataagatatataattgaaagagttatgggcattgtggatgaattacagtggtgtgttctcgtgatgaaggtgagtaaaagtggaggtgtatggcggagatgggtatgtagtgagtgaaggagaagcctgaacatgaattcaaggctgctgctcctgttgttgtgatgcaattatgggagatactggtgatggtgtgtgatgtat

SEQ ID NO: 1621 - DNA, 421 bp, Lilium asiatic
  Clone ID: LIB3229-030-P1-K1-G8
attttgtttgcatggtggtctctccccatccttggataccttagataatattcgtgctcttgatcgtatacaggaggtcccgcacgaagggcccatgtgtgatcttttgtggtctgatccggatgaccgctgtggatggggaatatctcctagaggagcgggatatacatttggacaggatattgctcaacaattcaatcacaccaatggtcttacccttgttgccagggctcaccaacttgtcatggaaggtttcaattggtgtcaggacagaaatgttgttactgtattcagcgccccaaactactgttaccgttgtggtaacatggcagccatactggaggttggggagaatatggaacagaacttcctccagtttgaccctgcaccacgacaggttgagccggatactactcgtaag

SEQ ID NO: 1622 - DNA, 420 bp, Lilium asiatic
  Clone ID: LIB3229-030-P1-K1-G9
attttgtttgcatggtggtctctccctatccttggataccttagataatattcgtgctcttgatcgtatacaggaggtcccgcacgaagggcccatgtgtgatcttttgtggtctgatccggatgaccgctgtggatggggaatatctcctagaggagcgggatatacatttggacaggatattgctcaacaattcaatcacaccaatggtcttacccttgttgccagggctcaccaacttgtcatggaaggtttcaattggtgtcaggacagaaatgttgttactgtattcagcgccccaaactactgttaccgttgtggtaacatggcagccatactggaggttggggagaatatggaacagaacttcctccagtttgaccctgcaccacgacaggttgagccggatactactcgtag

SEQ ID NO: 1623 - DNA, 75 bp, Lilium asiatic
  Clone ID: LIB3229-030-P1-K1-H10
tttttagattatccaggcttaaccacgacaccctacgacctcatatctcttctatagtggcacctaaactcaatc

SEQ ID NO: 1624 - DNA, 335 bp, Lilium asiatic
  Clone ID: LIB3229-030-P1-K1-H11
tcgatcactagaactcgggccctaatcgcgccccacgggcgggccggcctgtgatgcaagctaaccacgagatcatgcccgacgttctcgccgacggccgcgccgcctgctacaaggcccgcgacgccttctatgcctgcctcgaacgcgaatcggacaagaaagccactgaggccggcaccgtcggcctcctctacccatccgagtgcaagctctcccgcgccgagttcgtccacaactgccgcgcctcctgggtgaagcatttcgaccggcagcactgcgcgaagaagcgggtgcagcgtcttcttgatggggacgacggcggggagtcacgt

SEQ ID NO: 1625 - DNA, 287 bp, Lilium asiatic
  Clone ID: LIB3229-030-P1-K1-H12
cccacgcgtccgcctgccctctctgcaagtatgatatcctgaaaagtggcattcgcggtgctgatgagggccagccatacatccaagtacacaatccggaaatcctagagaggaggagtagaggagacgagctctgttgcagaaaggtcgaaggaatttttagttgagggaagcggagtatcggtgattcttcttatcggttagtggtttttcttggaacaactggactgtaattgaactttttattcttctagttataatcggaaagcatctgaggttacagtcaa

SEQ ID NO: 1626 - DNA, 365 bp, Lilium asiatic
  Clone ID: LIB3229-030-P1-K1-H3
cccacgcgtccgcccacgcgtccgctgggaggttcatgggaaagagggttgtgttcctgaagcagctcacgtctggtttgctccttgttactggaccctataaggtcaatggagttcctattcgccgtgttaaccaagcttatgtcattgggacatcaaccaaggttaatatatctggtgttaatgttgataagtttgatgacaagtactttgtgaaggagaccaagaggaacaaaaagaagactgaaggtgaattctttgaggctgatgaaaaggagaagaaggaagtctcacaggagaagaaggatgaccagaaagttctggattctgaggtggttaaagccatcgaagcagttccagatttg

SEQ ID NO: 1627 - DNA, 425 bp, Lilium asiatic
  Clone ID: LIB3229-030-P1-K1-H4
cgtctcttgtggacaagttgtggactgtcgcatatgtggtgacccaaaggctgatcttcgctgtgcctttatagagttcacagatgaagagggtgcaagggcagctttaggtctcactggaacgatgctgggttactaccctgtaagggtgctcccgtcgaaaactgccatagcacctgttaatgatacatttttacctaagtctgatgatgagcgtgagatgtgtgcaaggaccatctattgtacaaatattgacaagaagggttcacaagcagaactgaaactgttttttgagtcgatatgcggagaggtttaccgcttgaggctgctaggagaccaacatcattccacccgcattgcttttgtagaatttgtcatggccgcaagtgcaattgctgctctcagctgcaatggtgtggttctgg

SEQ ID NO: 1628 - DNA, 311 bp, Lilium asiatic
  unsure (1)..(311): unsure at all n locations
  Clone ID: LIB3229-030-P1-K1-H5
ccggacttcatcacgattgccaagggcttcaacatacccgcagttcgtgtggttaggaaggacgaggtcagggaggcaatccgcgtcatgcttgagacgccaggtccgtacttgttggatgtgattgtgcctcaccaggagcatgttctgccaatgattccgagtggcggtgcgtttgaagatgtgatcatcgaggagatggagaagtttatagtttttagaatgtcgtaatcggtttttgttttgntttcatgagtgttctaacaagttctttatgtttgtctacttatgagaatgttcatttaagtgat

SEQ ID NO: 1629 - DNA, 251 bp, Lilium asiatic
  Clone ID: LIB3229-030-P1-K1-H9
taatgttttcaattaagttttaatttttttaacgtaactagacaatgccttcgcgaggtattattgttatatgcaccacaaaaggagttcaagaaaatgggcagatctatacatgatcatgcatataaatctggactgtctatacttaaagaatctataggttatagtgtggtgcgagtctttcattgtgatcctgctgttctatactatataaacatcgatcttggacctatggtgtttgatcaaacatt

SEQ ID NO: 1630 - DNA, 410 bp, Lilium asiatic
  Clone ID: LIB3229-031-P1-K1-A10
cccacgcgtccgcaaaaatatgagagagaacgagaggagagaaaataagaaaccggtgccgagaccgtaaaaacaacgcgctctttcaacgattctgaccaaggaatcgcccgacgaatccacaaggggagaagtgcgcaaagatcttgatgttttcggttcctaatttgatgacgaagttcaaacttgcatgacaagtctagtctgatggctcttttctacgaatcgtaaggagggtgaaaaaaaggagagacaatgtgaggtgagaaaattgagaagagaatttgagtgaaaatatggggatagagaatacgaaccatgaggaaagatattacgagatgagaatctaagaggaaaaatgttagaagagagaatcaatgaagagagaatgataggagagaaggtaagtg

SEQ ID NO: 1631 - DNA, 351 bp, Lilium asiatic
  Clone ID: LIB3229-031-P1-K1-A11
ggggatgagcgaggaggaggagtagcagcaaacccttaaagggttgagctcaaatctggcccccaacctccacggcaacctcaaaagcgccgccggcgacgagcaattcaaggagatcctgcagagcatcaggaccaccaaaacccccgcggttatcaacttcggtgcttcatggtgtcgtgtttgtagccagatcctacccgccttctaccagttaagcaatggattcccaaacctctcgtttgtctatgtcgacatcgatgaatgtcctgaaacgactcagcacatccgttacaccccaacctttcaattttatcgtgatggagagagggtcgatgagatgctcggtgc

SEQ ID NO: 1632 - DNA, 424 bp, Lilium asiatic
  Clone ID: LIB3229-031-P1-K1-A12
cgacgatgtcgtcgctggggacttcgaaggggatcctcgagatcgccaagttcgcgcgtctacgtcaccatcccggcggttctcacctacgccgttgccaccgagtccaagaccctccacaagctcatgggattccgctcgtatgtggtgtatcctacccacagccttcgccctccacctccagaggaactccgtgagatggctcgagaaatggcccgtaagaacaagtcgtctgattaatatgtgtcgtactacatgtttgtgagatggctcgagaatggccctacatgtttctgttcgtatccaacagagtgctacattattatagttgcggttatgtactgtaaatgtttctgctgactaagttgcaccgaagaattgaataaatgcagggaaaatgggtgctgggtcaaccttttgatct

SEQ ID NO: 1633 - DNA, 241 bp, Lilium asiatic
  Clone ID: LIB3229-031-P1-K1-A3
acgaaaaagctcgtagctggatcttgggttgagccaaccggtcggccctcagaagcgggtaccggccgtcctgtaccgtctgccaacaatgcactcctggcctccactggccagatcgttcctacggcgccaatactttgaagaaattagagtactcaaagcaagcccacgctctgcatacattagcatgggataacataacaggatctcagtcctatgacgttggacttcgggatcggag

SEQ ID NO: 1634 - DNA, 348 bp, Lilium asiatic
  Clone ID: LIB3229-031-P1-K1-A4
ggcgatatcagtagtctttagctaggaggaatcagggtgttatctgtataatatgcagagttgagtcctagaatttttcttttttattgtttcattcttcttcttaatatgtaggaacctggtgatacccccaagctgtagtttagattggactaaaaagaagaacctggtgatggcccccaagctgtagtttttagattggacgaaaaagagatgggggtaaactttcagaagtttcagttgaaaagccatctagtttacaccgttcttgatactttcagtgaccaaattaaatggtctgtaacttcagtttcatctagatacatgtggatgcccagttatgttaaa

SEQ ID NO: 1635 - DNA, 432 bp, Lilium asiatic
  Clone ID: LIB3229-031-P1-K1-A5
caatgccgccaaaaatatcactgatgaaggtgactcaaggcgaggcgattcggaagtattatcacgacatgcatgtgatacaagacatgttgattccgatgtacaaagtcggagattgtctggaattcttacacgaagagatggaggtgtatccaatctggctctgcccgcaccgtgtcttcaagcttcctgtgaagacaatggtgcaccctgagccgggcttcgagcaacataaccgaccaggcgacactagctatgcgcagatgttcacggatattggtgtctactatgccccatgtccggtgctgcgaggcgaagttttcgatggttccgaggccgtgcaccgcctcgaggagtggctgatcaggaatcatggataccagcctcagtactcggtgtctgagctttccgagactaacttttggcgcatgt

SEQ ID NO: 1636 - DNA, 406 bp, Lilium asiatic
  Clone ID: LIB3229-031-P1-K1-A6
ctcgttggccgagtcggcccgccaattcatcggtcgtaccgctgcattgtgcggtacgggtaccgtgacgtccaccaggatgtcgactcattcgagtctgagctcatttccagtctggctgattttgtgatgttggaggcgtcgttcggtggccatcggtctagcgggtcggtgagtgacaacagtgaacatgggctgactgttggcagcggtatgttcttaggccgccatgactatgagttggagagcattgagccgtgcagtgtgtcgctggagttcccggaaaagggcaatgtggttgaactgccccatagcaggaggagagttaggtttctgttggaggacaatggttgggtcggagatggacaagcgagtgagggaggaacttgaggagctgtggcttgag

SEQ ID NO: 1637 - DNA, 285 bp, Lilium asiatic
  Clone ID: LIB3229-031-P1-K1-B10
agacgccatcgccgccgccggagcagatcaaccccacccaccaaaatggtcaagtgcctgaaacccaacatggcggtgatcatcctccacggccgtttcgccggccggaatgccgtcatcgtccggaacttctatgagggcagcagccgctaccgcccctacggccactgcctcgacgccggcatctacaagtacccgaagaatgtaatccgcaaggactcggccaagaagacggcaaaagagtcccgcgtcaaggctgtcatcaaggtgggcaactacaaccat

SEQ ID NO: 1638 - DNA, 125 bp, Lilium asiatic
  Clone ID: LIB3229-031-P1-K1-B11
aattgagtttactctctactcacatatatatgcctcaaatatatgctaatctggtggagaactgttgaattatgctttgagtccaagattattgaagtttaatcaataggaaatggttgttcttt

SEQ ID NO: 1639 - DNA, 415 bp, Lilium asiatic
  Clone ID: LIB3229-031-P1-K1-B12
cccacgcgtccggcctgccaagagaatatatgagagtcttctggttaacaatccaaatgcaacctcactagcacacattcagttcattcggtttttaaggagaaatgagggtgttgaagcagctcgcaagtacttcttagatgcccgaaagtcgccaagttgcacgtatcatgtatttgttgcttatgctatgatggcattttgtcttgataaagatccaaaggttgcacacaatgtttttgaagcaggactaaagagattcatgcatgaacctggttacattcttgaatatgcagatttcttgtgtcgtctaaacgatgatagaaacgttcgggctttatttgagcgagcattaagtttgcttcccccagaagaatctgtggaggtctggaaaaagatttactcaatttgagca

SEQ ID NO: 1640 - DNA, 296 bp, Lilium asiatic
  Clone ID: LIB3229-031-P1-K1-B3
acgcctagatgcacgatggcggatatctctgacgcattcaagcgctacactaccaacagtgtaacggggcgcacattcgatgcaagagccgaagagatcaactgggatgctgcgctgtgtgatatccaaaaagagtatgctcatctaggattgattcatttgaatggatgcactttcagtgaggcaagagaagatatgactgaccgtacgtatgcaattagcagtatctatacaatctcagcagttctatttaaatgtagggtatctgcaatgcgctcgtataatgagtcgtcagt

SEQ ID NO: 1641 - DNA, 430 bp, Lilium asiatic
  unsure (1)..(430): unsure at all n locations
  Clone ID: LIB3229-031-P1-K1-B4
ggtcatatgcgctcacaaaagcagaggaagttcaggcaggacttaatcctgacattcctagctttgtaaagcctatgacccagtcacatgttactggtggattttggctgggtctgtctaagcattggtgcatcaaatacctaccaagaaccgattcaaacattactttaatagacgaacaaggtgaggagtctgaaactctctggcttgcacagaagatgggattaagcgctggatggagaggattttcaatagctcataagttggttgatggggatgcattagtttttcagagggtccagcgtacaacattcaaggtatacataattaggcaaagtgagtatgatgagagtagttgatgcagcctcagcacctaaatgcntatggagaagaattgcaacaggactgtggtgctgccatgagagtgttc

SEQ ID NO: 1642 - DNA, 348 bp, Lilium asiatic
  unsure (1)..(348): unsure at all n locations
  Clone ID: LIB3229-031-P1-K1-B6
gggaaattgatgaagactaaaggatttgagcctgaggaagaagcctccagtgtaaaggaatgatggaagggaataaaaagagagggaaagaaaatcgaaatgaaataaataaagaataaaacaaaacaaaaataagtaaatataaaaaataaatataaaaaaataagtagaagatagaagagcccagattccaaatgaacaaattcaaactcaaaagggatctttctgattctcgaagaatggggaggggcaaggggattgatcgagaaaaatctcttgttcttattataatattgngatttgacccgtatatggtttggtaaaaaaataatcttcttctttgatcat

SEQ ID NO: 1643 - DNA, 234 bp, Lilium asiatic
  Clone ID: LIB3229-031-P1-K1-B7
gccatacttaggctgaaactaaaatcatgttgattttgggggctctaatgtagcaggtttattatgtttttagcattatgtctttattatattttaggcctccatcttttgtcgatccaaacagattaagagaactatatgttgtatcagcttcgagtaaataagattggtgcatctggttaccaaaaaaatatggatattgcatcacatatatttcattgcaaaaattaatct

SEQ ID NO: 1644 - DNA, 233 bp, Lilium asiatic
  Clone ID: LIB3229-031-P1-K1-B8
gttcaaatactatgaaatgctacttgatatacaaaagggttaataaaatttcgggcttctttgaacagaccaggcggaacagaactgggagcaacgccctttgaatcccaatcagttggagtatgctgctcttgacgctgttgtcctcgtcatatattccgcatgttcgtgaccatggccatccttattctgctgccaatgacgagggcttgaaagctgaatggaaatcgaag

SEQ ID NO: 1645 - DNA, 260 bp, Lilium asiatic
  Clone ID: LIB3229-031-P1-K1-B9
acgacatctgctcatatatataatatatgtctatgcttcacaataaacaataaaaaggaggattttcaatgcgagatataaaaacatatctctccacggcacctgtgctaagtactctatggtttgggtctttagcgggtctatagatagagattaatcgtttattcccagacgcctagtcatttccttttttttgattctagttattgatatgcaaaacaataaaaaaattagggattaaattctatgtgacgtgatta

SEQ ID NO: 1646 - DNA, 244 bp, Lilium asiatic
  Clone ID: LIB3229-031-P1-K1-C1
acgtccacacctacgcacacgcatccatttttacagtcgtcatggattaaatcgatagctcggacagtgtgcggaaggctttcaatcacttgtgacaaatactcacgcacggtatagcataagtcatgggctaatcaagctcttacccaatacaattgcctcttgtactagaacacactatatacagaccaaatgtagctccacgtttgagttatagaagtgtacaggatctcacgcctgctga

SEQ ID NO: 1647 - DNA, 403 bp, Lilium asiatic
  unsure (1)..(403): unsure at all n locations
  Clone ID: LIB3229-031-P1-K1-C10
cccacgcgtccggcctgccaagttaatatatgagagtcttctggttaacagtccggatgcaacctcacttggtcagattcagttcattcggtttttaaggagaaatgagggtgttgaagcagctcgcaagtacttcttagatgcccgaaagtcgccaagttgcacgtatcatgtatttgttgcttatgctatgatggcattttgtcttgataaagatccaaaggttgcacacaatgtttttgaagcaggactaaagagattcatgcatgaacctggttacattcttgaatatgcagatttcttgtgtcgtctaaacgatgatagaaacgttcgggctttatttgagcgagcattaagtttgcttnccccagaaaaatctgtggaggtctggaaaagatttact

SEQ ID NO: 1648 - DNA, 392 bp, Lilium asiatic
  Clone ID: LIB3229-031-P1-K1-C2
acgcggagctctccaacgtgttggagccatgcatgctggtcgatcttgtagtgaaggcagcagatgccgttgattgtgatggcaagtgtgtctgctcatgttcatggaccgcggtatagatccgcggtacgagaaagctaacttttagttgtatataggagatgaacgtatcagctcatgggttgtagctgcgctctggacaaggaactatggttatgattatatgcacttagacataccgacatagatgtgtggacctaccatgatcgctcgcatatatgtatccgatatatttgaatttgatatgaaatgacttgtatgcatatgacgtgatcaatttgtcttttgttaaatagagctaaaaatcaaatagagttatattctagatgttt

SEQ ID NO: 1649 - DNA, 316 bp, Lilium asiatic
  unsure (1)..(316): unsure at all n locations
  Clone ID: LIB3229-031-P1-K1-C3
ggtaccgaaccgcagtgtcgacccaggcgtacgcgcgggaagggtcggaaggagctcgttttatgctgagcgaagcagcaccacaaggtcctgtgcaacaacattcatggcaggaccaagccnnccatgcaccgcctcgcccgccgtggcggagtgaagcgcatcagcggcctcatctatgaggagacctcgagggtgctcaagatcttcttggagaacagtatgcgtgacgctctcaactacaccagagtacgccccgcggaagacggtcacattcatggacgtggtctacactctcaagcgccagggacgcacc

SEQ ID NO: 1650 - DNA, 374 bp, Lilium asiatic
  Clone ID: LIB3229-031-P1-K1-C4
tccaaaattaggaagagtatattctatcggttgttgatgcaacagtgaaaactggaattacatggcagatggatgcatttaaagcacggtttaaccaggtttttgatgtctacacactgcaaatattttctccgcatgagttggactacctgatttgtggtcgcagagaattgaggcagcctgagacactggtggatcatataaagtttgatcacggatacacagcgtatagccctgcaatcatcaatctacttgagatcatgggagaattcactccagagcagcagcacgctgtttgtcggtttgtaactggtgctccaaggctttctcctggtgagttggcagcattgaatccgaagctgaccatagtgaga

SEQ ID NO: 1651 - DNA, 333 bp, Lilium asiatic
  Clone ID: LIB3229-031-P1-K1-C5
gagaagatggtgcaggaggctgagaggtacaagtctgaggacgaggagcacaagaagaaggtggatgcgaagaatgcgctggagaattatgcttataacatgaggaacaccatcaaggatgataagattgcctcgaagctgccggcggaggacaagaagaagattgaggatgccgttgagggggcgatacagtggctggaggggaatcagcttgccgaggttgatgagttggaggataagatgaaggagcttgagggaatttgcaaccccataattgcaaagatgtatcagggatctggcgggatggggatggatgaggatggccctactagc

SEQ ID NO: 1652 - DNA, 138 bp, Lilium asiatic
  Clone ID: LIB3229-031-P1-K1-C6
gctgccgaggttcttgaattggctggtaatgcagctcgggacaacaagaagaaccggattgtaccacggcatgtgtgcctggcgatgagaaatgattaggagcttgaaacgctgttgaatggtgttactattgctcac

SEQ ID NO: 1653 - DNA, 362 bp, Lilium asiatic
  Clone ID: LIB3229-031-P1-K1-C7
cccacgcgtccgcggacgcgtggggcttatacaatttttaaggatttactggataaatcggaggttttgtgaactgtgttatgtcaattgagattaatatgcacccatgggataacatcactgctaagctcagcagtcacttaataaatagaagtgctgtatgtactagactttgtcatatacagatttattttggctctcgatatgttataaagtagtaaagatgatcacaatacttttggtttcttgaaaaagagtaccacttctcgaaggctttacaagataattatgtttgtttggctgtctattaccattttcctatcgaaagttgtgtcaatcctcttgatgaacttttgtgcatg

SEQ ID NO: 1654 - DNA, 381 bp, Lilium asiatic
  Clone ID: LIB3229-031-P1-K1-C8
caactccacaaccaccttcactctgctacaccggcaaaagcttcatcaaggtacatctatctactttcttgtgccgtttatgccttatttggattggtatgtgtaggattttggaaaagcttggatttgtgtggcaaaatgaggaaaggatcaaagctcaagaaggaaaagagatgttgcaatcttgatgaggatgtgctcttggatctataagtacccctccttccccattggattgaggtaagaggtctcactccggcccgagtgggggagggcacatttgtggccggctttctctcgagtttggaggaggcacattgggagagcatctacatgtgatttcggagtggagaagtcatcatgggtcttgtttgtggatct

SEQ ID NO: 1655 - DNA, 167 bp, Lilium asiatic
  Clone ID: LIB3229-031-P1-K1-C9
cccacgcgtccgaaactgtgttgtggctagtttcatttaatcttcttcacttgggtgagatttgtgttgaggctggttaattcttcgatgttctagacattccctgtttttcgactcagttttatttaagatataatttatcgttggcactgataaatctgatttga

SEQ ID NO: 1656 - DNA, 371 bp, Lilium asiatic
  Clone ID: LIB3229-031-P1-K1-D1
cttcaatcaatcccctcaatcatcgtctctctctctcagcaatggccggacgtggcaaggcggtcggctccgcagcggcgaagaaggcgacctcgaggagcagcaaggccggtctccagttcccggtcggccgtatcgcccgctttctcaaggccgtcaagtacgccgagagggtcggcgccggcgctccggtctatctcgccgccgtcctggagtatctcgcagccgaggttttggagttggctgggaatgcggcgagggataacaagaagactaggattgtaccgaggcatattcagcttgctgtgaggaatgatgaggagctttcgaagttgctggagatggtgactattgctaatgggggggtgatg

SEQ ID NO: 1657 - DNA, 254 bp, Lilium asiatic
  Clone ID: LIB3229-031-P1-K1-D10
ggcgaagcggcttggcaatactaaggggtctgcaagttcctcacaattgcttcctgggagaaacatccctcgaagcagcctggtccgtaaccttcaatgacagagtcgtcgtcgcagcctgaaagagcttctcccgtgttatcatcttttcttagttctcatattgattttggaattaaactcggcatcgactaccctgtgacaatgtggtaggtctgcatctgacatgacttgctgtaggggaaatgaagctg

SEQ ID NO: 1658 - DNA, 291 bp, Lilium asiatic
  unsure (1)..(291): unsure at all n locations
  Clone ID: LIB3229-031-P1-K1-D12
tctcattgtacatggttggatttttgtttccaaatgcttgccaactctgttttttgttaccactgatctctgttggtgctggnttatccnggttcacatgaaatctcccaaccattaatccttataccttcctctttgttttttttaaagcaagttcctttaccttttgaactaaaataaattccttctaccgagttacattccaaatcaaactggaattgcttactgacatggatatcaattatgtacattattctgttttatttttcataccaattgtacctttacttt

SEQ ID NO: 1659 - DNA, 252 bp, Lilium asiatic
  Clone ID: LIB3229-031-P1-K1-D2
gtcctacccatcttcaagcatctgcttttcctcaaaacaatcattctgaagaggtttttccacgtaaaagttctggaccatacaccggacttactgctccacttacaccatctattcatccattcatgtgtccggccgactctatacaagcctcatatgcacctcgtgctcagcagcgccaacattaatccctctatgagtactccttttacgtttagtaacactcctatacatttatctaaacatcactcc

SEQ ID NO: 1660 - DNA, 427 bp, Lilium asiatic
  Clone ID: LIB3229-031-P1-K1-D3
cgatccctctgaaaccctatattctctaacagccgatcccaaacccagcaacagcggaagtgatgtcggccccagggatggacgaagacaagaagccggcgcccgatcagggcgctcacatcaatctcaaggtcaagggccaggatggcaatgaggtcttcttcaggatcaagcgtagcactcagctcaagaagctgatgaatgcatactgtgatcgccagtcggtcgacttcaattctattgcctttctttttgatggccgcatgcttcgcggagagcagacccctgatgaattggaaatggaggaaggagatgaaatcgatgctatgctccaccaaaccggtggtgtgaagaatgaacatgatcagatatttagctacttggggatttaatgacagcgaatgttttccatgtagctctggtagct

SEQ ID NO: 1661 - DNA, 402 bp, Lilium asiatic
  Clone ID: LIB3229-031-P1-K1-D4
ctcccatccattgcaacagttgcagcccacagcgacagttgaaaatgatcctgaaataaagtcttggctttctttgggcaccaagtcgaagaagaaaggcggtggtaaaaagaagaaaggtaagaagggtgatgcgaaggacgactcatctgaagctgaagccatggatgttgagacaactgataaacctgaagaatgaaaaatcacctcatctcatcctgctactgtagcgttccctggcctgctttggctgtttatgcttatttatgcatcttggtcagctgaatgctgcaaatgtttcttgtttgagttgaatttaaatgagttgagatggaaatgagcaaaaagcttttattgtctaggcaaaagatctcaaataccaatgcttactgtgtcattact

SEQ ID NO: 1662 - DNA, 244 bp, Lilium asiatic
  Clone ID: LIB3229-031-P1-K1-D6
cccacgcgtccggggaagcagtcaggtgttagcaggggcacctcgccttcagcggagccgcgctgtgtcaagagatcgcgttagagactggaacttcgatgaattccttgtggaggtttaggactgtaaattgaatcgaggcttgtgggttgtaactgaattcaccggaaataatttcagcactgcacctgcatattgtatgccttactgtttcccagttcttgtatgcatggtttagctgatc

SEQ ID NO: 1663 - DNA, 338 bp, Lilium asiatic
  Clone ID: LIB3229-031-P1-K1-D7
gtcctccccatcttggagcaactgatgttcctgaaagcgttgattctgaagagggcgttccacgtcaaaatgaaggctcatattccggacttcaagcttgcgttcgaccatttctgcatccatgcaggtgggagggcggtgctcgacgagcttgagaggagccttgtgctgagcagcgggaacatggagccctcgaggagtactctgtataggtttggtaacacttctagcagttcactgtggtatgagattgcttactgtgaggccaaggggaggatgaaaaggggagatcgagtgtggcagatagcgttcggatcgggattcaagtgcaacagtgc

SEQ ID NO: 1664 - DNA, 384 bp, Lilium asiatic
  Clone ID: LIB3229-031-P1-K1-D8
ggaggacaatagagcaagcaagcacattttaacaatagaatcattcttttattcggtttattcgtattagcactgcgccaaacaccgtcccaactcacccacccacaattactattgagccactgctgggtccggctgactcaattgaagccacatatgcaagtcgtcgaccaacgggccgtgaatattgcatcatttcgggctcctctacccttaactgtagttcctatacgtttctctaaacgtcactcccggattttcatgctcctcaaccattatgatgcatttcataccacatcaattacatccatggtttggtgccgaaaacctcttttgccgttcttgctcaaccttttcctgatggttacgattgagtgccaattc

SEQ ID NO: 1665 - DNA, 279 bp, Lilium asiatic
  unsure (1)..(279): unsure at all n locations
  Clone ID: LIB3229-031-P1-K1-D9
cccgaagaaattcttcccctcaaagagttcttttttacccggattatctgctcggtagagtccaatctggcgacagacctctttttcagccccaagagagatggggcctctcaacttcaccaaggcttgaattcgacataaatctcccgctncaaccatagatgacctgccacgcaccagttgtctatgcccacaccaagcagaaatcatatcgactcctccctccacgaaaatcggggatcgccagatatcatgcaaactcgtatgtgtcctgagttg

SEQ ID NO: 1666 - DNA, 277 bp, Lilium asiatic
  Clone ID: LIB3229-031-P1-K1-E1
attcagtccaagaccgggacgggcctcagtgggaactgctttatagacaccgacaagggcgttaaaggaagaaatctggtgaaagccgccttcagacagtgaccacaactctggataatggaatcgaagatgactattctcaaaacgaagccatccatgaacatctgttacaccctgccaccgcaatcgggatcttcactcactcgatccccatcaaatgccttctcacaggattgctggactgcagtccttcgatgtctcagaaaatctgcatcga

SEQ ID NO: 1667 - DNA, 56 bp, Lilium asiatic
  unsure (1)..(56): unsure at all n locations
  Clone ID: LIB3229-031-P1-K1-E10
ccttttcttcccacccccccngccnaaatttctctttattactactccccacccca

SEQ ID NO: 1668 - DNA, 315 bp, Lilium asiatic
  Clone ID: LIB3229-031-P1-K1-E11
tctcattgtacatggttggatgtgggttgccaagtgcttgttaactctggtttggagacgactcagcccactggctcctggtttatcttgtttcagttgaaatctccgaaccattaatccttataccttcctctttgttttttttagagcaagtccctgtaccttgtgaactaaatgaagttccttctaccgagttacatcccaaatcaagctggagtggctaactgacatggatatcaattatgtacattattctgttttattgtcatacaattgtactttacttaattagtattgaattttttcatcatatct

SEQ ID NO: 1669 - DNA, 276 bp, Lilium asiatic
  unsure (1)..(276): unsure at all n locations
  Clone ID: LIB3229-031-P1-K1-E4
ggcagctactccagctaaagggaagctcccttctagaaaagcacctgcaaggattttgtggcttnaagtgggcttttgttgggtgacncngatggcanctggctttaaattggctgatgtttgagggggcatgtgcgtcgttggcatgccaagtaagttttcctagtttggttttaggttaataagtatactcctctctccccacccaaactcgtttcttttatatattaatagtttagttttcagtgtcaatcttatcatttgagacattatcta

SEQ ID NO: 1670 - DNA, 136 bp, Lilium asiatic
  unsure (1)..(136): unsure at all n locations
  Clone ID: LIB3229-031-P1-K1-E6
gacgccacgcgtccacccacacatcccaagcagccctcatatattttctcaacacaactaacccacacaagcgagggtccaaccctaatagtgtagcacccaaccacaacncccaancctgcaccaaacaacccca

SEQ ID NO: 1671 - DNA, 421 bp, Lilium asiatic
  unsure (1)..(421): unsure at all n locations
  Clone ID: LIB3229-031-P1-K1-E7
cccacgcgtccggacacttactgttatgataaagcgtggcaataatttgaggcagtcagtgggtaaccctagtgtgtactgcaagctcacacttggaagtaccccagctagactatcgaagattgtatcaacaggtccaacacctgaatggaatgaagcttttacatggtcatttgatagtcctccccggagccagaagttaaaaataacctgcaagaataagagcaaatttgggaagaattccttcggaaaagtgactattcagattgatcgggtgcttatgttagggtcggtggctggagagtatacattgttgcctgaaagcaaaagcggacctagtcgaaacctagaaatcgagtttcagtggtcgaacaaataacaatcgaagtggtacgtncttttttttcttcttncaatgaca

SEQ ID NO: 1672 - DNA, 231 bp, Lilium asiatic
  Clone ID: LIB3229-031-P1-K1-E9
cccacgcgtccggttggaatgggagaaggaacagaagtagtgttagcattatcttgttttgtcttggcattactattggtctttatgcatatgagatcgaaagtggtggtgagactctccctaactgccttgtagcaactctttgctttactctcttgttcgtcaatggggatatgtatctagtttcctgaactatttggaatggaacttagctggtttactctttttttc

SEQ ID NO: 1673 - DNA, 377 bp, Lilium asiatic
  Clone ID: LIB3229-031-P1-K1-F10
cgcatctcccccgtcgtcgccgccgctcgatggctcctctcgctcccaagaccggggatgccgccttcgccgccgtggagcgcgtgaatgcggagctgttcacactgacgtacggagcgatcgtgcggcagctcctgacggatctggaggaggttgacgtggtcaacaggcagctcgatcagatgggttataacattggaattcgattgattgatgaatttcttgcaaaatccaatatatcacgatgcgttgacttcaaggatacagctgaagtgattgctaaggttggtttcaaaatgttcctaggcgtaaatgcatctgtgaccaattgggatgcggaggggacaagttgcagccctgtattagaggataatcac

SEQ ID NO: 1674 - DNA, 395 bp, Lilium asiatic
  unsure (1)..(395): unsure at all n locations
  Clone ID: LIB3229-031-P1-K1-F11
caatggcacgaggagagaaggctgtaatttatgttagcaaaatctacttatcagagtctcctttgattccaatcatagaaggccttgaagaagttcagtttgaagtagaacttgttcacttcattcaggtgagggacatgcttggtgatggacgtctcataaagcgccgcattgttgatggaagaggtgagtttcctatggactgccctcttcatgatagcttgctaacagtgcattacaagggaatgcttcttaatgaagaaaagacagtattctatgatacaagagttgataaccatggagagcctttggagttcggttctggagaaagacttgtgcctgagggactcgaaatgtgtngtcgactaatggcttctggagagacanntctgtgt

SEQ ID NO: 1675 - DNA, 127 bp, Lilium asiatic
  unsure (1)..(127): unsure at all n locations
  Clone ID: LIB3229-031-P1-K1-F12
cactcacactaggagagaagttttttttttatcttaacacaacccacatgtcatgttctcccatgattgtattcggggaanccctnnaanaannncaccttgaaataaaactcgttcacttcattca

SEQ ID NO: 1676 - DNA, 203 bp, Lilium asiatic
  unsure (1)..(203): unsure at all n locations
  Clone ID: LIB3229-031-P1-K1-F6
cacgcttccggntctagatcacgnacagcctctctatttttttcaagcttacatacacccccaagctaagttatanctcttttatattgagacccaacaccaacncactncccctcatattacaacctcataacttataaaaccctttcatcacccaacttaatcaccttttatcacatcccccatacaacatcttacataat

SEQ ID NO: 1677 - DNA, 279 bp, Lilium asiatic
  Clone ID: LIB3229-031-P1-K1-F7
aagaatctgaggctgaggtctatttaaaggagctgagtcccgagagaagattggtgagtggaggttcctctctcggtctcagtgtttcttctctatccgtttgtagcacgagcaaggagggtgaagccatagagttctagagcttctaggagtttattagagttgaagagttagtgtggagttctaatgttcttgactgttagtgattcatggaagcttgagttcgaattgacactatgatggagatacatagaacttgatgatgcatctttcaactcg

SEQ ID NO: 1678 - DNA, 269 bp, Lilium asiatic
  Clone ID: LIB3229-031-P1-K1-F8
cccacgcgtccggccgaagaagtgtgtttatcacagactcgctgccaaagacggcgactgggaagatccagcgccgtattgtggctgaaaacttcttggttcccatggcgaatgcgacgaaggttggggcataatagtgatagttcagaaattaccaagcgaagggaagaaagtgttttgtgtttttgttttaatagaagtttgtcctgaatccgcttcagaacaatgaactttggttcatttgtcaattttttaaaaattgttctaat

SEQ ID NO: 1679 - DNA, 182 bp, Lilium asiatic
  Clone ID: LIB3229-031-P1-K1-G10
cgcatctcccccgtcgtcgctcttgttttatggctcctctcgctcccaagaccagtgattccgccttgggctgcagggagcgcgtgaatgcggagctgttcacactgacgtacggagcgatcgtgcggcagctcctgacggatctggaggaggttgtcttactcaacatgctgattgatcag

SEQ ID NO: 1680 - DNA, 377 bp, Lilium asiatic
  Clone ID: LIB3229-031-P1-K1-G12
aacacaccagggcttgctatttctactttgtgctttatgcccgcctgatgtatccaaggttcgtgttggaaagctttccccgtatggcattgaaaccctgaggaatattagagattttcttggcgtcaaatttgatattaaaccagaaccgttgtcgaacacagtcgtactcaagtgtgtcggatgtgggctaaagaatctctcgaggaagctttcatgagcgatcggtaatgtcatggacgttcttatgacttcagacctttccgacgaactttcttattcccattaaggtgccttatatatgattgagcatttatggagaagtgctgatgatgtggcccagttttggtatttacattagaatatgttgatacttt

SEQ ID NO: 1681 - DNA, 301 bp, Lilium asiatic
  Clone ID: LIB3229-031-P1-K1-G4
cggacgcgtgggggctgtggctgcaagtgtggtgataactgcaactgcaacccctgcatgtgtggcaagtgatctctccatggagaagaggatgtagggtttgataccctttgtttacttgtttctgctgtagtgctgaataatggccatgggtttatatgatgcaagtctttttgcaccatgagtggttgttcaccagtggcttagtgtcttgtggtggtgctgtgttggctttgtatggtctgttgaaattactgaagtgttgtttttagtgttttatctaaatggaatattattgagt

SEQ ID NO: 1682 - DNA, 381 bp, Lilium asiatic
  unsure (1)..(381): unsure at all n locations
  Clone ID: LIB3229-031-P1-K1-G5
agataatatggtggatgagagcatctttctgtattgttccagtgagcaaggggtcaaactgttggattacaatgcgcaagatggaatagtgacagtgaagaaggcaaaggagtgggcggcgactttctacgaggaaactctctattctgttagaagttaaaagataatgtgatgtttggaggcaatgggtgaagagttgagggaaagcatatggcgtggcacatattttggtctgtatgcaggatggatgtgagtgatttgggatttcatgctcgtctgttcttggctcatattttggtgcaggaggcacttangcaatatgaatgcatggtttggaattatatcttcatgtatggaacaatctgttactttatattgggc

SEQ ID NO: 1683 - DNA, 311 bp, Lilium asiatic
  unsure (1)..(311): unsure at all n locations
  Clone ID: LIB3229-031-P1-K1-G6
tttcccaatgcccaccnnatgtatcttttnnatttcttttttttattttcaccaataacannnaaaccctcaataatattaacgatttctttctactataatactctctatataccataaactttttataacactgtcatactcaaatttcacagatgttttcttaaaatttttcatatgacacttcacatatttatcctaatttcattttcatttttattaattaatacttttactcctatactttattatttctcatataaataatctctattatatttatttataccattttttattttctaaccttt

SEQ ID NO: 1684 - DNA, 85 bp, Lilium asiatic
  Clone ID: LIB3229-031-P1-K1-G8
cggacgcgtgggcggacgcgtgggggcttgtacaacgaattttatcaaaatgattaactggattctgaaatcgagattttcgacc

SEQ ID NO: 1685 - DNA, 358 bp, Lilium asiatic
  unsure (1)..(358): unsure at all n locations
  Clone ID: LIB3229-031-P1-K1-G9
cggacgcgtgggttggatggtaacttctaggttgatacctctgccgctattcctgcaacaccggctgccccacgatgaaccagagctgctcctgtgcgcagaagagtgaggcgtaaatcttctgatgatgaggacgatgatgataatgaggctcttcctgctcttgaggttccaatcactcctagcctggtcagcgggcgttcacagagggcaagcaaggcgatagcaatgaccaaaatgagcattaaaaccaccattcagttctcggataatgaagatgaagaggagtcggaggtgacctcagatgattctagtgatgaatcttgtgatgggctntctgagtgaaacatgattctat

SEQ ID NO: 1686 - DNA, 379 bp, Lilium asiatic
  Clone ID: LIB3229-031-P1-K1-H10
aacacaccagggcttgctatttctactttgtgctttatgcccgcctgatgtatgcaaggttcgttttggggtgctttccccgtatggcattgaaaccctgaggaatattagagattttcttggcgtcaaatttgatattaaaccagaaccgttgtcgaacacagtcgtactcaagtgtgtcggatgtgggctaaagaatctctcgaggaagctttcatgagcgatcggtaatgtcatggacgttcttatgacttcagacctttccgacgaactttcttattcccattaaggtgccttatatatgatagaacatttaaggagaagtgctgatgatgtggcccagttttggtatttacattagaatatgtggatacttttg

SEQ ID NO: 1687 - DNA, 177 bp, Lilium asiatic
  Clone ID: LIB3229-031-P1-K1-H11
ccacgcgtccgggataagtgacggtctatctactaggagtggatagcctgtcttgcatcatttgcgtagtgctacgaataagtgtcaccctatctatctatctatctatgagatctcccctccatttgcttttgtaataagtggtaggtttataatttcaatgtgatctacttatct

SEQ ID NO: 1688 - DNA, 180 bp, Lilium asiatic
  unsure (1)..(180): unsure at all n locations
  Clone ID: LIB3229-031-P1-K1-H12
ccacccctccggcataagtttctttttatctactagaancccatancctgtctagcatcattttcttttttttacgaataannancaccctatctatctatctatctattagatctcccctccatttactattgtaataagaactatacttataatttcaatataatctacttatctaat

SEQ ID NO: 1689 - DNA, 431 bp, Lilium asiatic
  Clone ID: LIB3229-031-P1-K1-H3
cccacgcgtccgcaaaatcttcggagggaaaaaatactgaatcaagtggcagccatggcctagtcatgtaaagaaagtatgtctctctctctgctactgtcgagactcgatgccctgcgatttgttccatagcagatacatgttcgttttttatccaaaatctcttcaatctactgattttaggtatatcgactcttgtgattatgagccttcatattaaaattaagaacgccttttcagttaatatcatgagtaatgttaatgtacatttacaactctaggtgaaggagtggtgatagtagcatagctaagggtagctttagcatagacaatgagatatttgtggagtgtaaataagaatggtatgtgtgcacatagcacttgtactcctataaatacccctttgtgggcaacgaggaactcaacccaca

SEQ ID NO: 1690 - DNA, 369 bp, Lilium asiatic
  Clone ID: LIB3229-031-P1-K1-H5
ccacgcgtccgccgagaatggggccgacttttggagctatgatgatctcggggcagaaggcagcacatcttgcgctgagggctcttgggcgtggcaatgccctggacgggaaggtggcgcagccggagcttgtgttagcctcttcagagggtgatgttgtggaggcttagggttagggagcttgtgttggccttctctgaggcgatgatggagatgtttgggaaataagttagcatcgtgtggggggaataagatatgtagcctttattttcgatttgttccttcttcttttttttctttgttatgttgaatataatgtcgaacttgggtttgctagctcagttcaagctgaactttttttctttcttt

SEQ ID NO: 1691 - DNA, 426 bp, Lilium asiatic
  Clone ID: LIB3229-031-P1-K1-H7
cctacagtcgccggacacactcgaggatgctagctaagggcacaaccaatcaccaccgcatggcactcaacaacacactttcaggtcaataccaaaccggcatatcagcgtttcggacggcatagatattacaactgaatcagcgtgctattgtatgcaatgaccagttgatcactgggcaaataaacgaggaaatggccccacatgacatcaccatgcaccagcattcgcaggttgagacagaatcgctgcaatctgttgaagattgcctggtaaagctcacacatggctcatgagaaaataatttgcgagcttatgcattggcagggttggcttcatcattgcctggaatggatccacgaactgtgcatgtagaagtactatctcagccaagtacacatgataataagcattccagatatgttt

SEQ ID NO: 1692 - DNA, 400 bp, Lilium asiatic
  Clone ID: LIB3229-031-P1-K1-H9
caaacattaatgatagaaaacataatttggatataaatatgctaatatacctctggttcgatggattcttctttgcatctagtgccatccatttgaacttctaataagttaaatgaacatacggttctcttgtttaataatttgtctcttttgcactgcataagaggtagatggagcttatcgataaactattatagaacaaaaagattggacaacgaaatcatgcaagaactaggaagtagttcatgttgagatcttgtaatttaaggtaagcatacgtagcaagaacccctaaagaaaaagtcaagtgtcagccatcaaaagttcattgccacattctgacaaacaccttgcaaacattaatgtaagaaaacataatgggaatataaatatgatatat

SEQ ID NO: 1693 - DNA, 329 bp, Lilium asiatic
  Clone ID: LIB3229-032-P1-K1-A12
gtcggtcgtgagcatgaagccgagagcgatgctgtggatgcatgcaagagaagaggaggaacagagattcaatgccgaagattcttgaagctttatggaggagatgggcgtgagcggcaaggaatgctgccagatctgggacgtcaaagcgaggatgatagcgacaggagcggtggctgatcaagacttggtgatgaagttacttgggtctgacggaattgcagcatggtatcgacgtaatctggagctataaagagacttggaaggcagatggcagaggcatgtttggggctctgtccatccgatgacacgcctgatccagagagttc

SEQ ID NO: 1694 - DNA, 399 bp, Lilium asiatic
  Clone ID: LIB3229-032-P1-K1-A5
cggacgcgtgggctggcggctgctttcgcccgtccggcgatctcgatccggacgttctccaccagccccgccctttcccgcattccgatcctcgccgccgtccgccgccgctctgtctcaccggcgccgctcctgccggtcctcgatctcagccgcgggtatgccgccaagaagatggtgaccagcgatgtggagacggacgggagcgatgtggaaggtgacgacatataggacatggatgagttcgccgatgattttgatcggttcccagagggctacgaaaacggcactaccgatggtgataatgatactacagagtaattcagtaaaggtgagttggtggttcattgggaagaaatgggttgggattgggcaatgtgaggtgatggttcattggtt

SEQ ID NO: 1695 - DNA, 369 bp, Lilium asiatic
  Clone ID: LIB3229-032-P1-K1-A8
cctgagagttcatctccatgggcttctccttcttagtctcattctatccatctacactagcaagggctactcacgttcacttgttgcattaggacaagagcaagctgaggctagtgtccatggattcaagcaagttggtcgctcagaagacatggaaacatgtggtgatgatagagatgaggagtgctttaagaggagaatgacatcagaggcccatctagactacatctacacacagcaccaccacaacccatatatgtcaagggagcagcttatgagctatgatatgtaatgaatataattgatgatattgtcactgattaacctatttattatgtatggaaaccaagaaaattttggattgtgggt

SEQ ID NO: 1696 - DNA, 254 bp, Lilium asiatic
  Clone ID: LIB3229-032-P1-K1-B10
cccgcgtccgtccagcgtctgcagacgcgtgagctgactcatgtatgtacatcgtatctactagtgtagggccctacatgttttatttggattgttatgagaggattatggaaaagcttggatttgtgtggctaaatgaggaaaggatcaaagctcaagaaggaaaagagatgtttcaagcttgatgaggatttgctctcagatctataagtacccctcctccctcattgattgtaaagaggtctcactccggc

SEQ ID NO: 1697 - DNA, 306 bp, Lilium asiatic
  Clone ID: LIB3229-032-P1-K1-B11
ctctgttctaactctctgatcgcctttgtttttgagaagaagctgaccaaccgggtgcgggagatatattttcatatgcttgtcctcaacatcttcgtagtctagagcagcaatcgcctcaccagagcgttctaatgtaagccttatctctcacctgtacagactctcgatttctcaataggttgatgattagattttaattagatctatttgagttttgttatgtttgcattgatgattgtgatttcagttatgcagtctatgtgttacttaaatcatttgctagctttgttattgtgagattta

SEQ ID NO: 1698 - DNA, 399 bp, Lilium asiatic
  Clone ID: LIB3229-032-P1-K1-B12
gctgccttagatgtaataaaagatgaaggaatggttgagagagctgcacagttgggccaagaatttagggatcaactgaagaaaattcaaatggaatttccacatataattaaagaagttcggggaagaggattactgaatgcggtagacctaaatgatgagtctctttctcctgtctctgcttatgatatatgccttaagttgaaagagagaggaattctggccaagcccactcataacacaataattcgattggctcctccactctccataagtttggaggaactggaagaagcatcaaaggctctgagggatgtgttcgagattgatttgccaaacatgaattagcagatgcctaatagagatgctcccacagatgacaagacatgtgatagatgt

SEQ ID NO: 1699 - DNA, 153 bp, Lilium asiatic
  Clone ID: LIB3229-032-P1-K1-B2
gtacagaggagcctacctgacgtacgctggcacgcgacaggatagctatattatcgcgtcacctaaattcaatggacaggccccagatatacaacgtaccgactgagtaaaccacggcgctacccaactgaatcgcactgcatctcatccccc

SEQ ID NO: 1700 - DNA, 345 bp, Lilium asiatic
  Clone ID: LIB3229-032-P1-K1-B4
gtttggtaacatccgctcgccgatcgagttctagtcgaaggatggcagctagggcagcactcgccttgtcccgatcgcggttctcgccgtcgccgacgccgacgctgattccccggcgtggcctcgccgctgacgccgccggacgagatcatggataccagaaggttaacatgaaatatctgatgagtccgtctgaatggtcagaaaagcatcgtatacttgctagcttaagtctttggggctttttgtattataaaggaaacaagcattttactaagctggacgagaaacaaaagaaattggacaaaaaatacgcgaaagaggaaaaaaaaaaaaaagggcggg

SEQ ID NO: 1701 - DNA, 327 bp, Lilium asiatic
  Clone ID: LIB3229-032-P1-K1-C1
gaagagtcgaggtgtcactgatgttctatttggggactatggattcactggaaagctttcgcgcacttggttcaagtctgtggatcagctgcctatgaatgtaggagatgcacattatgatccactattcccttttgggtttggcttgacaactaaggcagctggatctaggtagagagttatgggtggattgtactagtttgggtttcatctttgagatggacatataagaacttgggtctagatatgagagtaatggaagtctattgattcaattggctttcacatttttatctcattaataatatatatgattctgggtgattt

SEQ ID NO: 1702 - DNA, 402 bp, Lilium asiatic
  Clone ID: LIB3229-032-P1-K1-C10
atcttcaccctccaacaccggcaaaagcttcatcaaggtacatctatctactctcttgtcccctttatgtcttatttggattgttatgtgaggattttggaaaagcttggatttgtgtggcaaaatgaggaaaggatcaaagctcaagaaggaaaagagatgttgcaagcttgatgaggatgtgctctcggatctataagtacccctcctcccccattggattggaaagaggtctcactccggcccgagtgggggagggcacattgttggccgtctttctctaggttttggaggaggcacattgggagagcatctacaagtgatttcggagtggagagttcatcatggttcttatttgtggatctttagtgagccttgagagagtcatgtaaatggagtttg

SEQ ID NO: 1703 - DNA, 372 bp, Lilium asiatic
  Clone ID: LIB3229-032-P1-K1-C11
cactgtgcgaactctctgatcgccatggcctcggagaagaagctgtccaatccgatgcgggagataaagatccagaagctcgtcctcaacatctccgttggcgagagcggcgatcgcctcaccagggcgtctaaggtaagcctaatctctcacctggacagacgccggtgttctcgaagggttgatgattgtattttaatttgttctatttgattttttttttgttggtattgttgtttgtgattgttgatttgtagcgaggggtagtgagaagattgcgtgctatgttactgtgaggggggagaaggtttatgcagcttttggagagtgggttgaaggtgaaagagtatgagttgctgaggaggaacttca

SEQ ID NO: 1704 - DNA, 433 bp, Lilium asiatic
  Clone ID: LIB3229-032-P1-K1-C12
cccacgcgtccgcccacgcgtccgcccacgcgtccgaagggagggaaggggctcggcaagggcggcgccaagcgccaccggaaggtgctccgggacaacatccagggcatcaccaagcctgccatccgccgcctggctcgccggggcggagtgaagaggatcagcggcctcatctacgaggagacccgaggcgtgctgaaaatctttctcgaaaatgtcatccgcgatgccgtgacctacaccgagcatgcgcgccgcaagactgtgacggcgatggatgtggtgtatgctctcaagcgccagggccgcaccctctatggctgtgggggttgatctagcactgttctctcttgggtctctgtttagttattttcggttagatgagaagtctagtcttcatatttctcggttgcaatgagatgggaatggaatt

SEQ ID NO: 1705 - DNA, 398 bp, Lilium asiatic
  Clone ID: LIB3229-032-P1-K1-C4
cccacgcgtccgtcgagatgttgcagtcgacccggccgccgctgttgcggttcgcgccgggttgcagcgggccgtttgcgggtcccaccaccacttcaacagccgaaggcccaactactagggaagtgtcactgcagaggtacttggtgaaaaggaaagacaggttcaagggtaaaaaagttgttcgagcttcttctccttcataccgggaaataatgttcaaccaaagacctagcattcagacgacgaatgaggaatcaaaccgaggcgacttgagttctccaacccagcctatgccacctagcacacctactaggtgcggttcaatggaaaacaaagcatcaaaactttgcatctctgtcgatctcaatgaagagggtgacgggtattgagtacat

SEQ ID NO: 1706 - DNA, 361 bp, Lilium asiatic
  Clone ID: LIB3229-032-P1-K1-C5
cgtgttcattgtcggatagttgagcgatttaaatctggcgagctgccattggttgccccttcgaaagattacacaaatacgttagtaagaggactggtggagggaaatcagctcagtgatactgaagccattgactacattaatcgtaatgctgctaagaagttgtgatttcattatgttgttggcttgcttgttcttagagaaagcagtatgtctttatagtaacgcaagagatttatgggcaattcttcttgttcagtttcacttgagcaagcagtatagctttatatagaatacctttgatttatgggttgcttatcctgtgcacagcttcagtttatttaaagcaggatttctcaaa

SEQ ID NO: 1707 - DNA, 321 bp, Lilium asiatic
  Clone ID: LIB3229-032-P1-K1-C6
agcgccgctgccggcgttggtgatcaaaagaactttttctatgctggaggcattggcgggattgctggcgggggtgttcccggactcggctttggcggaggtgttcccgtcgttggtgctggagtcggtggtgttggtggcttgggtgggctcggtggtggcattggaggaactagcggccttggggctggtaccggcagtggtgcaggtggcggtttactcccttgagttgggtgttggtttagttttcgtgagtaacgcatgcatgcattaagttgttgcaggggtcatggatgttagggtttggtctttttcttgtct

SEQ ID NO: 1708 - DNA, 347 bp, Lilium asiatic
  Clone ID: LIB3229-032-P1-K1-C7
agatcacaagagtgtataaggcgaatgagcatgtcgaatttgagttcattgttgggcccatacccattgacgacgaagttggaaaagaaatagcagttcaaataacaacagatatgatgaccgacaggacattttacacagattctaatgggcgtgattttattaaaaggattcgtgattataggtcggattggaaactcaaagtggatgaacctgttgctggaaattattaccctattaatcttggaatatacactgttgataagagcacagaactctcagtgttagtggatagatctgttggtggatcgagtatacatgatggacaagtagaattgatgcttcat

SEQ ID NO: 1709 - DNA, 190 bp, Lilium asiatic
  Clone ID: LIB3229-032-P1-K1-C8
gtgaattaggtgccctactggtttctagtgttgcatcaattaccatccgccgactgtggtccctgaaggtgatttggcgagggtgcaacatgcggtctgcatgatcagcaacaacacagctgtggctgaagtattctcacgaattgaccacatgtttgatctgatatactccaagcgtgcttttgtgcat

SEQ ID NO: 1710 - DNA, 196 bp, Lilium asiatic
  Clone ID: LIB3229-032-P1-K1-C9
gacctcacgcttccgcccacgcatccacaccattcaactgtttcttctgagcgcaagtatccgaccagagagagtgttgtacctcatgtatgccgccacaccactgaggcgtgtgagaacatgttggagcaactgctttaaattgtaagctgaactattttcaaattgaggcagcttctaatatctgcaatgcaat

SEQ ID NO: 1711 - DNA, 316 bp, Lilium asiatic
  Clone ID: LIB3229-032-P1-K1-D11
cccacgcgtccggtcacgattgccgaatgaaactttgcatcctacaaccaatgaggctgatgtagcaaaatatgttcgtgaggggagccccacagattaaagcgggagagaggagttggaaccatttcgccgaggggacagtgaattttcgaaaggaactgatccctatacttggtattctggttatgatcggtgcaatatctgagaaagaaagattacaaagcaatccatctactagtctgtaaaattttattgtacatatatgatttgctatagtattcaatttgatataatccagtcagttttgctattgtat

SEQ ID NO: 1712 - DNA, 428 bp, Lilium asiatic
  Clone ID: LIB3229-032-P1-K1-D12
caaagctcaaatctctcatcaatcatgtcaggccgtggcaagggagggaaggggctcggcaagggcggcgccaagcgccatcgcaaggtgctgcgggacaacatccaaggcatcaccaaaccggccatccgccgcctggctcgccgtggtggagtgaagaggatcagcggcctcatctacgaggagacccgaggcgtgctgaagatatttctggagaacgtcatccgcgatgccgtcacctacactgagcacgcgcgccgcaagacggtgacggcgatggatgtggtgtatgctctcaagcgccagggacgcaccctctatggctttgggggttgatctagttctcctgacctgggtctctgttagtttttggttggatggtaatttgggttgtcatggtccggtttcatatatctcggatgaaatgc

SEQ ID NO: 1713 - DNA, 360 bp, Lilium asiatic
  Clone ID: LIB3229-032-P1-K1-D4
ctggcctccagttccctgttggccgcattactcgttttctgaagaagggccgctatgctaagcgcgttggctctggagctcctgtctatcttgctgccgtccttgagtaccttgctgctgaggtgctggagctggcgggcaatgctgccaaggacaacaagaagtcccgaatcatcccgaggcacatctgccttgctgtcaggaacgatcaggagcttggcaagctgctcgccggagttaccatctcccatggcggtgtgatccccaacatcaacccggtcctgctccctaagaaggctgctgagaaggctgattctgctgcaaccaaatctcccaagaagacccccaagtctcccaaga

SEQ ID NO: 1714 - DNA, 375 bp, Lilium asiatic
  Clone ID: LIB3229-032-P1-K1-D5
gttgggatgacgtcccagtcctgcaactatggagaaagaagcatgatcacactaataatttgaatacttttctggagtcatatcaaccgatggattctatatcattgatgaatgaagccctttcgagcaacaaggttggttacaatggtctggatgttcacctaccattcaatttagagatattaaaatgggccaatgaaactcgtgaaattttgtcacgtgctaaagtccctccaacagtcaaattttacaatatatatgggatcaattgcggaactgctcacagtgttcgctatgggagtgagcaaacacctatatcagatctaagagaactgttgccaatgcagccgaagtatatctgtgtcaatggcgacg

SEQ ID NO: 1715 - DNA, 314 bp, Lilium asiatic
  Clone ID: LIB3229-032-P1-K1-D9
cccacgcgtccgcaccattcgactggttcttcggggcgcaggtatccgaccggaggagtggtgtacccgagtctgccgccatactactgaggtgtgtgagaacatgtgggagcaactgctttaaattgtaagctgaactatttgcaaattgtggcggcttctctgttctgcaatgcaatctgctctttgtttgtttgttaggagattattaagttattgtagttctttgctataaatatgaactctattgtaatggggtggcacaatttgttgtttggttaagttggtatttatctataatatctttggatctg

SEQ ID NO: 1716 - DNA, 413 bp, Lilium asiatic
  Clone ID: LIB3229-032-P1-K1-E10
atccgaataagccgccgactgtgcgctttgtttctcgaatgttccatccaaacatttatgcagatggaagcatttgtttggatatactacagaatcagtggagccctatctatgatgttgctgctatccttacatccatccagtcattgctctgtgatccaaacccgaactcccctgcgaattcggaagctgcgcgcatgttcagtgagaacaagcgtgactacaacaggagagtacgagagattgtggagcagagttggacagcggattaattctctcggagaatattgtgcttgaactctcggtattgtcatgagccaaatggttggaactctttaaatgtttgaattaggagttttatctgctaaagtttggtagacattgttaaatcaacccagtggaggagcatgata

SEQ ID NO: 1717 - DNA, 347 bp, Lilium asiatic
  Clone ID: LIB3229-032-P1-K1-E12
aactaaaaatagatcagaaagcgaatgctctagaagataaaaaaaaaaaaaaaaagggcgggcgatgtaaatagggccgggcgttcttacgcctcacatgcaacgcactcgcccttgtataacaacacctagactcaattcactggccactgatttacaactgacgggactggaaaaacttcggctttgcgaaacctatgcagttaccaaaatatccgcccttatccaactgtcgtattagcgaagaagccgaataagatcagagtcccgcactgttgggcatcctgaatggcgacggagacggaatctacaatgagactctccccgtagcgggcctttaaactacg

SEQ ID NO: 1718 - DNA, 56 bp, Lilium asiatic
  Clone ID: LIB3229-032-P1-K1-E4
tttccatatagctacaccattagtggatccttatttattttatcctcattctactt

SEQ ID NO: 1719 - DNA, 345 bp, Lilium asiatic
  Clone ID: LIB3229-032-P1-K1-E5
gcacccgccagggacgtaagagcttcatctctggcgcaatgagaagcaagaggagcctccatggctttcatccttaaaggatggaagaccagtggggccagctggaatcctgaatcctgcccctgttgcaagcctctgtatattatgtggtagatcgaatcgccaaatccggtcaccacaaagctgtgagtaaatgatgaccccaggtgtttagtaaggatgacaagtttagttggggaggtattagtttgagccagtaatcgtatagttaagttgtgagttgaagcttgtttgcttatgtaaatttatatttcctaatctggagtttcgaagttgtgggactga

SEQ ID NO: 1720 - DNA, 371 bp, Lilium asiatic
  Clone ID: LIB3229-032-P1-K1-E6
gagcatgccaaagcgctcgtgtgaagatcctgaggggctataaatggagccaagcagagagaagagggacacgctggaggctcggaatgaagtaatgggttgagttccagctagggttgaagggttatctatacctccgattgagatggaacctttgagttcgatctttctcggagtgtattggataatccgagagagatagttagtgattcaatatagagtgcatgtaatattgtgagcttgagagatttatatgttttcatcattgatgtactttgatctctgctgtcatggttgtaagctttccttaagcctttctttactgtctagaatattggttgtttgagatcaataaaagttctggtttcatt

SEQ ID NO: 1721 - DNA, 219 bp, Lilium asiatic
  Clone ID: LIB3229-032-P1-K1-E7
cccacgcgtccgtctggtttgaaattctatgttacgtggaagtgaaggcaataatgagtttgagtttgtatgatgcacccaacggcactagctgcctcgccaaccaatttttggcttttaaaatgaaataattttaccatttctttgaactttgacaattttgtgttctgtaaggccttcaacggccccacttgatgaaattatttgtgttagtaccgc

SEQ ID NO: 1722 - DNA, 221 bp, Lilium asiatic
  Clone ID: LIB3229-032-P1-K1-E8
cccacgcgtccgtctggtttgaaatttttttttacgtggaagtgaaggcaattgtgaggttgagtttgtatgatgcacccaacggcactagctgccttgccaaccaatttttggcttttaaaatgaaataattgtaccatttctttgaactttgacaattttgtgttctgtaaggccttcaacggccccacttgatgaaattatttgtgttagttccgcat

SEQ ID NO: 1723 - DNA, 223 bp, Lilium asiatic
  Clone ID: LIB3229-032-P1-K1-E9
cacaaataaagaacgaaatgcactgaatctgaagcaacacacagctaaaaatacaactcaaaatctgatagaagttgattgagggacgtagcagggagatgggattggaaagaggaaccggaaacaattgaattgagtgacacaggaaacaaaggggagaaattcccttttccttccagatgtacccaattcaatggaccccagatccatcatttaccattcc

SEQ ID NO: 1724 - DNA, 112 bp, Lilium asiatic
  Clone ID: LIB3229-032-P1-K1-F10
caagagcatcagtattttagaagagttgcttttatgaagaggttatgaagaaggggggggggctatctaatgtggtgaggactgcccagaaggcatgaactctcatcagatg

SEQ ID NO: 1725 - DNA, 359 bp, Lilium asiatic
  Clone ID: LIB3229-032-P1-K1-F11
atttgaagatgttgacattgagacagctgttgagtggactctctttgggtgcttttggaccaatggtcaaatatgcagtgcaacttctcgtcttcttatacaagaaagcatagcggaaaaattcttagataggcttgctgtttgggccaaaaatatcaagatttcagatccactagaagaaggtcgcagactcggccctgttgtcagtgaagggcagtacgccatgataatcaaaattatttcgactgccaagagcgaaggtgcaactattttatgtggcggtggacgccccaagcatctagagaagggattctatattgaacctacaatcattacgatcgtgtgcacctccatgcttt

SEQ ID NO: 1726 - DNA, 160 bp, Lilium asiatic
  Clone ID: LIB3229-032-P1-K1-F12
ccctttctataggttccaaacctacgcacgggggcgggccacgtcatggctgtcctatattgtcgcagactttctattcactggcgcgttaactacaacgtcgtgacccagatctagcctggcgggtgccaacttagaagccttgcatcacattctagtt

SEQ ID NO: 1727 - DNA, 371 bp, Lilium asiatic
  Clone ID: LIB3229-032-P1-K1-F3
cccctcagaacctcagacttcaactttagccacagtttcgatggagactggatcgaaagccaagaagggcgccggcggacgcaagggcggaccgaaggcaaaatcggtgagccgatccgtcaaggccggcctccagttccctgtcggcaggataggccgcttcctcaagaaaggccgctatgctcagcgtgttggctctggagctcctgtctatctcgctgccgtgcttgagtaccttgctgctgaggttcttgaattggcgggcaatgcggccagtgacaacaagaagattcggattgttccccgacatgtgtggctggctgtgagatatgatgaggagcttgggagggcttgtgggcggtgtttacttt

SEQ ID NO: 1728 - DNA, 326 bp, Lilium asiatic
  Clone ID: LIB3229-032-P1-K1-F5
gagattatctgcccatcctggtgcaagaactgcatgatgtcgccgaagttgatctatccgccgctatacatttgtcaggatctcattgtcaactactgcgatcacaactgtggcttgggaggcggagctgccacatctgagtaactagctgcgactattctcagcagtttgggcggtgaccatattgataagtgacgggctatctactatgagtggatagcctctctttcatcatttgcgtagtgctacgaataagtgtcaccctatctatgaagagcgtgtcgtggtggggatatctcccctccatttgcgtttttgattaaagt

SEQ ID NO: 1729 - DNA, 434 bp, Lilium asiatic
  Clone ID: LIB3229-032-P1-K1-F6
cggaagctgagcaccaatcggtgtaatgcttttccatccaactcgttcaacacaaaccggaccgggaagttcagattggggaaagcaattcggggaatgggtccctccgggggtagcccgtttcccagttgctgaaagttgggggtctcaagccaggcatcgattcggtgtctagcttcgatcaccaatcccatcaacccaatctctggtctccaaccaatctcgcacgcgtgcgcctacagtgcgggggaggtgagttagagaagaaataaaataaggtaatcatagctatttatattcttgaacttgaagacaatatccccatattgtcttcaatcaatcttcaaagcatatctttcacaggtaggtcgttcccccacccgtgcatataaaggtatcagcttcatcaagatagaggaaagagagagaatgct

SEQ ID NO: 1730 - DNA, 255 bp, Lilium asiatic
  Clone ID: LIB3229-032-P1-K1-F8
tgctgctgctggggcggtttatgaggcgtacagtgtgtgctgcgcttaccaccaagctgcttctcgcttggattttccgcctcttttagaggttgcggaggttggaaggttatgtcttcagtgagatttttgatgttttaatggtcagactgaaagcattttagtagtgaaatagttggtagttgatcgatgtttgtgattcagtagcttgaatccacttgatgtatgagaatgtagtagttgtgatttcttgaa

SEQ ID NO: 1731 - DNA, 333 bp, Lilium asiatic
  unsure (1)..(333): unsure at all n locations
  Clone ID: LIB3229-032-P1-K1-F9
agaagacagtcaagaagcatccagagcttcaagtgcctatataaaccttccctagtgcacaagaattatacaagtctccccatgagctgagtgtagaattccttgggagcaagcatatacaagtctccctgctagcaagaaggcaaagctccttagtgacggagaagccaaactgactgctgaagagagcctncagtgaagcttgcagaccccttggtgacataggaggaagcagcttagctggagtaagaataggctagcttagcttagtatttctccctcatgttttaagctagaataatatttcctcatttgaatggcatttaagtttct

SEQ ID NO: 1732 - DNA, 214 bp, Lilium asiatic
  unsure (1)..(214): unsure at all n locations
  Clone ID: LIB3229-032-P1-K1-G1
cccactcattcccttctatattactttcttccgctctataagatccaagagaaggtactcttttattcgacttcttacctcctctaaagngacacctaaattcaatttactgaccttcgttttacaatgactcagctatcaaaaccctataatttcctaacttattctacaattaatacatccctctttcttcaagctttttaaccacctatat

SEQ ID NO: 1733 - DNA, 430 bp, Lilium asiatic
  Clone ID: LIB3229-032-P1-K1-G10
cccacgcgtccgcccacgcgtccgccagccgctaaccgtttctccggcgctcctccggcgagaaaggaaagacaatggaggctgacaaaccaggaaagcctgctaagtttccccacataacagtcatcatcaacggaataacatccgagccttcaaacaccaatgctgatgatgccccttcgatgtcaaccaacgaggaaggcgatcccattgctgaacagggtggagtcgtagtccataaggacgtcgctggcatattatctcgccgaactctcgccctcgaagtccgcatcgacaagatcgaacaggagattcggaccctcaagtcgaacttcaacggaaggctgactaggatagaagataagatgaagactcttctcaaggggcaagaagaaatactaagcaagatggaggagctggaacgagtttg

SEQ ID NO: 1734 - DNA, 382 bp, Lilium asiatic
  Clone ID: LIB3229-032-P1-K1-G12
cataataatggctgctgaatacctcttactagatattaatcaggtatgcaattgcttggtagatgtgattatatggcataattatggattactatatatagacgaagaaggtaactcccgtaacataaatctaggaagtctgatagatatatttttaggaggtagatagtccatgtgatgattgatatagagtttccagatgagtggttaactttaaaccataattatatgatacatgatcacatactaatatcatcaagttcccaattcttcataagtgatacatggattcttggaaattttgggcatctttattgccccttgattcctataatactcattaaaggaggtaggagtcatagcctaaatttctctagattct

SEQ ID NO: 1735 - DNA, 96 bp, Lilium asiatic
  Clone ID: LIB3229-032-P1-K1-G2
aacactatcatagtatacactgagaaaactggatttataagaataaagatcaagttcgcttgcttacaaaaaaataactataatatagagaaacat

SEQ ID NO: 1736 - DNA, 252 bp, Lilium asiatic
  Clone ID: LIB3229-032-P1-K1-G3
ttcgcggatgccggccggtggcgttcactagaagggaagaaggagagtgtggggttgcggtggtgatgaaatctagtgacccgtacgaggacttccggacgtcgatggtggagatgatcgtcgagcggcagaagttcggcgccggcgagctggagctgctgctgcagacttacctcttactgaactctccccgccaccacccggccattatcaaggcgttttctgatatatgggaggttctatttgctaatt

SEQ ID NO: 1737 - DNA, 155 bp, Lilium asiatic
  Clone ID: LIB3229-032-P1-K1-G5
tcgaacaaagatgcagaccaagctctctttgaacaaggaaggacggcgcggggcgggaattaactgagaacgggcctgacacaagcaagttcaactgccccaacgacccaaaaaccatgcccagaagcatagacgatgatcatcgagcactcacc

SEQ ID NO: 1738 - DNA, 416 bp, Lilium asiatic
  Clone ID: LIB3229-032-P1-K1-G6
ttgatgggaagattcccgaggagctgggcaatctcaagagcctcattagcatggacctctatggcaaccgcttccatggcgagatcccgaagtcgcttgctaagctcaagtcccttcggttcttgcggttgaacaataatcagctcaccgggtctataccaagagagcttgcatccctcacaaacctcaaactcatcgatgtctccaataatgatctttgcggaaccatacctattgatggtcctttcgtcaattttccctttcaaagttacgataacaacagcaggctaaatggacccgaactacaaggactggtcccatatgatttcgggtgttgattccaagtgtttcgcgtcattgagatcgatgctatactttgtgctgattttagatttgggataagttgaatgtatact

SEQ ID NO: 1739 - DNA, 389 bp, Lilium asiatic
  Clone ID: LIB3229-032-P1-K1-G7
cggacgcgtgggcggacgcgtgggcggcgcgggtgatgtcggtctcctccgcctcaaccttcgtgaccgccacattcggcgctcggatggaggaatcggtgaagaagacggtgacggagaaccccgtagtcatatactcgaagacctggtgctcgtactgcttggaggtgaagacgctgttcaagcggatgggggtggagccgctcgtaattgagctcgacgagctcggccctcaaggaccacaattgcaaaaggtcttggaacgactgactggacaatatacagttcctaatgtctttatcgggggcaagcatgtcgggggctgcgtagatactgtaaaacttcaccacataggggagctctctactctactatcagaaactgatata

SEQ ID NO: 1740 - DNA, 377 bp, Lilium asiatic
  Clone ID: LIB3229-032-P1-K1-G9
agagaaggtcactgaagaaaccatttcatctcgtaagaattaccttgataatggagggatgtatagcctttctggcatgaaagagggaccatcaaagtacagtatgagtgtaagtatgtaccgaggaggttcccggggatacggaaggccaagaactgcacctccggatttaccttcactgctcctagatgctcgaattgtctacttgggcatgcctatagttccagcagtgactgagcttcttgtcgctcagtttatgtggttagattatgatagtccctccaaacctatatacctgtacataaattcaccagggacacagaatgagaaaatggataacgtggatctgaaactgaagcatatgctatagctgatac

SEQ ID NO: 1741 - DNA, 167 bp, Lilium asiatic
  unsure (1)..(167): unsure at all n locations
  Clone ID: LIB3229-032-P1-K1-H11
ctagaactctttattcaagatctattttggtttaactancgagaacccaataggggcggagtgggtgatattcggcactcccctttctgcctcgtctcctctatccctaaaccttttatatctagcccacacccgtcctttccggagtttattccgctctctctccc

SEQ ID NO: 1742 - DNA, 362 bp, Lilium asiatic
  Clone ID: LIB3229-032-P1-K1-H3
cgccggctagctgctgcgggcccctgaagagagagcggtgaagacggaggcgccgtgcctctgtggcttgtttaacgacacgtcgcttctgaagaccttcaacatcgacctcaagcaggtactccagcttcccaaggcttgcgggatcacagagagtaggacgaccctgtgctccaatgtatccgccacggcgcctcccacctctcccaccggtccaactccagcatcatcctcccctccagctacccctgcaggtagtaaatccaactctgcatatggaacagcttcgatcggtttccctgtgttgactggcctgctcttgttcttatggtccatgacagcatatggttcaaattccacgc

SEQ ID NO: 1743 - DNA, 439 bp, Lilium asiatic
  Clone ID: LIB3229-032-P1-K1-H5
gccgacggtccagatcaagcacacggtgaagaaagaaggacggcgtggatcgagaaaaagcaaagaacggccatgattggaggtcaagtacagctgaagcaatcgacagagaagatcaagcccagaagcatccgacggtgatctatcgagctctcacgcctataagaagcagaggtcgaggaaggagaagggggatcttcgttcttggtttgtctcaaactacttccccctttgatgcctcacatgaagattgcatgaagccttgacttcttggggagagttgagcaggccggaggaaggcacggatctaccttgcatgtcagtgatcgaagaggaacatcacttgttcgtcttctctcactgactaaggtcatccacttggtgaattgagcctgagtttttttttatgtctgtaagatttgagttggatgcattcctc

SEQ ID NO: 1744 - DNA, 283 bp, Lilium asiatic
  Clone ID: LIB3229-032-P1-K1-H7
cccacgcgtccgcccacgcgtccgttgtgctctgaaagctaggattgctaactggggggggaacaacatgggcttgaactggccgcaagatttatacgagaaggtggcgacgattgtatgaaatgttaggctggggccagtttgtgacatgtatgggagggattatatacagaaatcaagctattttttgccgcaagttgtggcgtcgccttccagctccatgttgatgcctgccaagtttcctttagttgtcaggttatgcgatttgtttcgggttcttatt

SEQ ID NO: 1745 - DNA, 53 bp, Lilium asiatic
  Clone ID: LIB3229-033-P1-K1-A10
cccacgcgttcggtcgtaagagccgcatggcccacttcacggcgccgaccagc

SEQ ID NO: 1746 - DNA, 375 bp, Lilium asiatic
  Clone ID: LIB3229-033-P1-K1-A11
tctgattccatgcttgtaaatactgtactgatgcttgtgtatatcactaagttcttttggtgggaagctggctattggtgcacaatggatattgctcatgatcgagctggattctacatatgctggggatgcttggtatgggtgccatcggtatacacttctcccggaatgtaccttgtcaaccaccctgtcaacctcggtaccccgcttgcactttctatactcgcagctggacttctctgcatatacatcaattacgactgcgatcgccaacgccaagaatttcgcagaaccaacggaaagtgcacgatttgggggagagctccttctaagatagtggccacctattagaccgagaaaggcgaaaccaaaaac

SEQ ID NO: 1747 - DNA, 354 bp, Lilium asiatic
  unsure (1)..(354): unsure at all n locations
  Clone ID: LIB3229-033-P1-K1-A12
cctccatggaggacctccgatcgaagtccttctccgacggccgcctcgacatggaggtgtacggcaaccgagccgccgcccctcctggcctcccgccggacttcaggtcctacagcacaccccatgcgcaggcgaaccatggcttgccaagcaaggggaagccggcttctggatcatcgtcgtcgtccggttcggccttgtcgaaaggggtgtggtgcctcagtgatccggagctgcaaaggaagaagagggttgcggngtacaaggcgtatgcggtggaggggaaagtgaaggggtcgctgaggaagaacttgcggtggttcaaggagaggtataccccaggtgctcaatggg

SEQ ID NO: 1748 - DNA, 247 bp, Lilium asiatic
  Clone ID: LIB3229-033-P1-K1-A2
caagaacagtgctgacacacaaatctacagcattgagaagagtttgttcgagtataaggacaagatccctgctgaggttgcttcagaaattgaggctgcggtgtccgacttgcgagcagagatggcaggggacagtgtagaaagcatacagaagaagcttgatgctgccaacaaggcggtttcaaagatcggagaacacttgtctggccgttcaggtggatcgtcgtaaccgtccgggggggccaag

SEQ ID NO: 1749 - DNA, 271 bp, Lilium asiatic
  Clone ID: LIB3229-033-P1-K1-A6
cccacgcgtccgcccacgcgtccggttttgtagagaactcagctgctgctgtttcctcgtcactattaaattcgtctaatcttgtgaaggacgatgacgctaccttccctactcgtacgtgttctccagccatacctgagattggtctaggaagatgtattggcagagggatttccagtcaagtatctgttggtcttcccatgagtttaggatctgttggtgggattgacggtaatgtggcacttggttctgctactccagtatctgacac

SEQ ID NO: 1750 - DNA, 434 bp, Lilium asiatic
  unsure (1)..(434): unsure at all n locations
  Clone ID: LIB3229-033-P1-K1-A9
acccgtatctgctcactacttcgctgctcaagggtcacctgggatcacataacgaacgtgggaaggctgttgttgcgctcaccagcancaaagacaaatctggcacttggttctttagtcaaaaaggcgatgggccgacgactgggaatgggactctgtccgggctgaagcccggccttcatggctttcatgtgcacgccctgggggataccaccaatggctgcatgtctactgggccacacttcaatcctgctggaaaagtgcatggagcccctgaagatgagaaccgtcatgctggcgaccttggaaatgtgactgtcggtgaagatggtaaggttacctttaccattgttgacagccagattccactctctggacctaattccattattggaagagctgttgttgtccatgctgatcctgatgatcttgga

SEQ ID NO: 1751 - DNA, 322 bp, Lilium asiatic
  Clone ID: LIB3229-033-P1-K1-B1
atgcgccagactgttgctgttggagtcatcaagagtgtggagaagaaggatcctagtggtgccaaggttaccaagtctgctgtgaaaaagaaatgagggttctgttttcttaatagtagttaagcccagccaatttactgagtttattttgtacttgtcatgcgtcttgtttgtttcgtacttgccatgcgtcttgttttaacaagatgcttgataggttgatgagtttatgtgttgaatttacagtttggtcttattttgtcggtgtcttaaaagtttggacctgatgagttccatgtggtaaatttacagtttggtcttt

SEQ ID NO: 1752 - DNA, 259 bp, Lilium asiatic
  Clone ID: LIB3229-033-P1-K1-B10
attgctcctcgatctaggagtccatggcagcgaaccagggattgacggagaggaaatcgctcctatgtccaaggaaaatgtggcaactccgtgatcgcgatgtttgcgctaccctagcaccatgttatgttatgacattcttgagtgatcaaactctctgctgctttttacattatgttttcatgcttttatcaatgtgtgcgacaccttagcactatgttatgccatatccttgagtatttaacagagagttctgtat

SEQ ID NO: 1753 - DNA, 283 bp, Lilium asiatic
  Clone ID: LIB3229-033-P1-K1-B11
accggaggacgcggaccacccgtcgaagacatggcaattatacaccttgtggccttgacttgctaagggtggtgcaaccttgatgggaatgagaactctgctttggctaaaaagaaggaagtatgaaggtcgtcaatatgttagcaattgtcgcacaacttattaaatggtttgtgggaaaaactcttggcaaagggaagtgcagattttccttgtggaaactagccagagaaggtaggcccactataagattggcacgttgggaaatggaaggtgatcctga

SEQ ID NO: 1754 - DNA, 307 bp, Lilium asiatic
  Clone ID: LIB3229-033-P1-K1-B12
cccacgcgtccgttctacaccgtcgtttagttctggagcttgtatgaggtactgggacctatcaagttcctggcaaatgctgatttccactgtttcaaagctgggatagaacccaagtgggaggatcctgaaaatgcaagtgggggaaagtggtctgttaccagtactggaaaggccaatcttgactccatgtggcttgagacgttaatggctttgattggagagcaatttgaagagagtgaggagatctgcggagttgttgcaaatgtccgccagagacaggacaagatcgcactttggacaaaga

SEQ ID NO: 1755 - DNA, 155 bp, Lilium asiatic
  Clone ID: LIB3229-033-P1-K1-B2
atgggccagagcgctgccgcttgagttctcgatagagcagagatacacggagctaggggctccaatgcttcctaggcttgtgataaaaagagatgatgcttctgaccacttgctagcagataagcccagcgacactgctgagagcatgctgaact

SEQ ID NO: 1756 - DNA, 402 bp, Lilium asiatic
  Clone ID: LIB3229-033-P1-K1-B3
agcctcgactctgctagatctgttataaaagcgggacgctctcgagggggttctacatcaactgttctttgtgctcttttcgaagttgtgtatgggtctcccgtcaactttcattcaccatagcatccagcatagaaggtgtgagtcggtgcttgcttagtcattttccttgatttattgatggaaaggcaggagcccgaggctatgcagtagcgtatctcagttgtcaattatagggtcattttcctgtgctcttggtggtgactactatgcctgatcatgagtggttatgatatttatctgtgctttagggtgttactgccaagcttgatcatcctccttaatgtttgtgcgctgatggtgggtacaatcatccctggatccgaattataaaagctgttt

SEQ ID NO: 1757 - DNA, 280 bp, Lilium asiatic
  Clone ID: LIB3229-033-P1-K1-B4
gtgaccctgctttatcggcctggtcactacgacattctctactccaagtgactccatcatcgaaaactcggattgatctgctaaacatcaaatttctggaatcgtattactggttgggctgtaatctgtggagcatttggattgtgtaaacaatatcaatgtgaacgcagagaatgatgcattgtggtggatacaagtttttaagttgatggttgtatgaactagttgaattgtgggactctctttaaatttttcttaaattggtatgcatagttaattg

SEQ ID NO: 1758 - DNA, 151 bp, Lilium asiatic
  Clone ID: LIB3229-033-P1-K1-B5
agcaaatcgggaattcaaaaaacctcaaaatacaagatctaacattttacattttggtctactcattcacaacttttttcatataatattatgtatttatttcacttagatacatgtaatagtaataaaaaaaatattctattaccttttt

SEQ ID NO: 1759 - DNA, 315 bp, Lilium asiatic
  Clone ID: LIB3229-033-P1-K1-B6
accacgcgtacgttctacaccgtttaggagttctggatcttgtatagaggtacttcgacctagcaagttcccggcaaatgctgatttccactgtttcaaagctgggatgggacgtagtgaagggtctctcagattggctaaggcagatgtgtcggcacgaacttatctgaagatgggatttgttgtctagaagaagctcttgggcgaagaggttaagttgtttgatttccctgagtggaagactaagccagagaaggtaagggcccactatgaagtattggcacgggttgaggaaaaatgggaaggtgatccctg

SEQ ID NO: 1760 - DNA, 134 bp, Lilium asiatic
  Clone ID: LIB3229-033-P1-K1-B7
actaattccatgcctgaaaatactgttcttattcttgcaaatatcactacaaggggcgggtgagaagctttttgttggcacacaatgtatatagcaaaacatcgagctgtaatctacatataccgagtatgcat

SEQ ID NO: 1761 - DNA, 343 bp, Lilium asiatic
  Clone ID: LIB3229-033-P1-K1-B9
gttccccagtcttgttcgctgcgatgatctgacagagaagcaagacgctctcgtgtggtttcttcatcaactgttctttgtgctcttttcgttgttgtgtatgggtctcccgtcaactttcattcaccatagcagccagcatagaaggtgtgagtcggtgcttgcttagtcattttccttgatttattgatggaaaggcaggagcccgaggctatgcagtagcgtttctcagttgtcaattttagggttattttcctgtgctcttggtggtgactactatgcctgatcatcagtgttaatgatatttatctgtgctttaaggtgttactgccaagcttgatca

SEQ ID NO: 1762 - DNA, 199 bp, Lilium asiatic
  Clone ID: LIB3229-033-P1-K1-C1
gttcaagagacgtattcgatgcggattttttctacagcggcctgacggacaagggggggttcttcagcaaatgtgccatgtcctcttaccaaaatagccaatgcaactcggacataatatcatttacaataacggcacttgacaggcggaactaggcgaagctagcttacagatcatcgtccagacaatgctggaaagg

SEQ ID NO: 1763 - DNA, 226 bp, Lilium asiatic
  Clone ID: LIB3229-033-P1-K1-C10
cccactcgtccgttcgacaccgtttatttgttctggagcttgtatgaggtactgggggctatcaagttattttcatatgctgatttacactgattcaaagctgggatagaacccaagtgggagtatcctgaaaatgcaagtggtggaaagtggtctgctaccagtactggaaaggtcattcttgtcttcatgttgcttgagacgtttatgtgctttgattgtatag

SEQ ID NO: 1764 - DNA, 326 bp, Lilium asiatic
  Clone ID: LIB3229-033-P1-K1-C2
gcagcctgagacactggtggatcatataaaggttgatcacggatacacagcgaaaagccctgcaatcattaatctacttgagatcatgggagaattcactccagagcagcagcacgctttttgtcggattgtaactggtgctccaaggcttccttctggtggtttggcagcattgaatgctaagctgaccatagtgagaaagcaatccttttctgtgacaaacacaacaccgaactgaactggaacatgtgaaaccgctgatgatgcccttcccacggggatgacttgggctaattattctaaacttcctccttattcaaccaagg

SEQ ID NO: 1765 - DNA, 281 bp, Lilium asiatic
  Clone ID: LIB3229-033-P1-K1-C3
gtcctccgcggggatctgaacaagatcactgtcggcttctcctccaacattcaggagcggtgtgtgcttcacgccgcctggtcctcccccacaggcctcccagcagagacatctgtcgaccgttatgtgactgtaggtgcatacagtctcttgcggtcttgcaccattgagccagaatgtatcattggacagcactccattctaatggagggttcattggtggagactaattcaatcctttgagctgggtctgtgcttccccctggccgaaggataccaac

SEQ ID NO: 1766 - DNA, 210 bp, Lilium asiatic
  unsure (1)..(210): unsure at all n locations
  Clone ID: LIB3229-033-P1-K1-C4
acgcccacgcgtacgttctacaccgtctagtttttttggagcttgtatgaagnacgtcgtcctatcaagattttttcggatgctgaaaaacactgtttcaaaactgggatagaacccaagtgggaggatcctaaatatgcaagtgggggaaagtggtctgttaccatttctttaaaggccaatcttgacttcatttagcttgagacgtaa

SEQ ID NO: 1767 - DNA, 416 bp, Lilium asiatic
  unsure (1)..(416): unsure at all n locations
  Clone ID: LIB3229-033-P1-K1-C6
gttttatggaacggtgtgctcctactgccaaggatcttgcatcacgtgatgttgtgtctagatcgatgactatggaaatcagagaaggtcgtggtgtagggccactgaaggatcacatttatctgcatctgaatcacttacccccagaggttctcaaggaaaggcttcctggcatatccgaaactgctgcaatctttgccggtgttgatgtcactaaggagcccattcccgtcttacctacagtgcactataatatgggtggaatcccaacaaattaccatggagaggtagtggatatcaaaggtgataatccagatacggtgattcctggcttaatggctgccggggaggcagcttgtgcatcagtccatggtgcanacaggcttggtgcaaattctcttcttgacatagttgtc

SEQ ID NO: 1768 - DNA, 412 bp, Lilium asiatic
  Clone ID: LIB3229-033-P1-K1-C7
tagaaggagatgtatcgctcgaggatctcaacgaaggcgtacgaccaggtcacagtaggcccttcggttcatatgccagctccgattacgattccagccagtacaacgaggacatgaagaagttcagaaaaatggcactagcaagccgagactatgctagtagcgagtacagcgcaccgaccagtgaatacggtcaggtcctctcagcatccagcagtgaagcacaggacacccaagatatagaattgatgaagatgaaaagcaatattcaaggattcatcaactcctgaaacttccaccggtgattgttgtaaaatttcttaccctaattctttattttccccatttttccatgtgggcttttattattttgtgtggaatatatgcaatgttcaggcctaaagtttaagtt

SEQ ID NO: 1769 - DNA, 244 bp, Lilium asiatic
  Clone ID: LIB3229-033-P1-K1-C9
gatttctttagatttattcagatgcatatcgttcaacccgagacgaattttatggtagatgtgttcttgaattggttttttgtaaaatctggagatagaggaagtgaggacatgtatgatgggaagtggattttatcctgtatgtcgaattttcttgtatttgtacattggtctcggaattctgtcatatatgtaaacatttggtgctaccagatttagaattaaatatgttgcatttgttagc

SEQ ID NO: 1770 - DNA, 402 bp, Lilium asiatic
  Clone ID: LIB3229-033-P1-K1-D1
ccacgcgtccgcgcagctcatcgctcgcaccgttttctagggtttcattactgccgcctctaggtttttgctctccgaacgatcaaagatgcctctcccgaacgacattgatctgctcaacccgccggccgatctcgagaggaggcggcataagctcaaacgcctcgtgcagtcacccaattcattcttcatggatgtgaagtgccagggatgtttcaacataacgactgtgttcagccactctcagactgtggttgtctgcgggaactgtcaaggtgtgctgggccagccgactggtggcaggccaggcttaccgagggatgcttccttccgcggaaggcggattgagctcggttttggtctggtcttttagcactcactccccatctttttgcggatgat

SEQ ID NO: 1771 - DNA, 323 bp, Lilium asiatic
  Clone ID: LIB3229-033-P1-K1-D10
ggatggcggtggtgctctattatggggagctgacacccgagcatacaacgaatttgaggaaggtgatgtgcgcacatctagctgacattctagcgcccgtagtgaagaaaacaacaaaaaggatacgcgttatggcgcatccaacctgacatcttctgcttatgctatagtcgcatgtgtattggagaaaatgaagctgatcattgagcgatataacaccacggatgagatcatgagacagtgtcatatcatagcttaacagcttgatgtgacatagcttttagatcatgctgatgccctgatagtaagcctgcatgacaaga

SEQ ID NO: 1772 - DNA, 90 bp, Lilium asiatic
  unsure (1)..(90): unsure at all n locations
  Clone ID: LIB3229-033-P1-K1-D11
ctgagtacctggctgtctctatgtgtttgtgttgtgttggacatgttggggttatattaagttatatgaagatctagttcttgctgngtt

SEQ ID NO: 1773 - DNA, 306 bp, Lilium asiatic
  Clone ID: LIB3229-033-P1-K1-D12
tctctgatgctcagaactcctaactttttgtaaagattctagtgattgaaatcttcggcagtgcgcttgggttgttcggagttatcgtaggcataattatgtcagctcaagcaacatggccggcaaaggcatagaggtcggttcagtaaaccatgcgtaatttctgatctcttttgctctggtctgaatgaggttaatgtatgtagttttatcttaaatctttctctttgtatcaacttgtttctatcatatgctctccctcatacctgtttgagtaattaatttagttgtagtgtggggcgactt

SEQ ID NO: 1774 - DNA, 363 bp, Lilium asiatic
  Clone ID: LIB3229-033-P1-K1-D3
ccgatgaggaggttgacgagatgatccgtgaggctgatgtcaatggtgacggccaaatgcaactaccaggagttcgtcaaatgcattatggccaattgaggataatatttattgcgaacaaccttttactaaaagtcagatacttagtcaggcctatgcgccttctggttcagtcatctgtcttcagggtaaaacccgtatcagatcttttttatgtaaggcgcatgttattcctttgaaacatggtgtccttttatttacacaaaccgtgaacacctactggtttaatttgggttcttattgaacgttatatggttttcaaaaaaaaaaaaaaaaggcggacggtcttaaggattcaaactt

SEQ ID NO: 1775 - DNA, 319 bp, Lilium asiatic
  Clone ID: LIB3229-033-P1-K1-D4
gcaaaggcagctgggaggtctccaaaaggtctccgccaatgtggtcttctcagactgccggtgagatggagttgtccgaggactacacccgtctggtttcacgggccgaaccgaagaccatccacatcttcgacaattgcacaaccaaaagctctggaggatgtgttcttggacttttggcattcttggaagaagaggtttggagaggggccaggcctttgtattttgcaggataatcctaatacttaatttcaaccttggtttaatgatagggggaattgaacatgttggcctttagttaatttttaggacggttgaa

SEQ ID NO: 1776 - DNA, 202 bp, Lilium asiatic
  Clone ID: LIB3229-033-P1-K1-D5
gtgcattgcttacctttgaggctgcgcggggctgagggttcgcctatcaggtgcattcttatcaaatgagcacttcttttctccatcctgcaggaaagagactccgtacttaagttttatttgaatgatgcacagacttgcgttcataataaccagcgaacaaaagatacaaagtgttctatatattatgcttgttcataaa

SEQ ID NO: 1777 - DNA, 397 bp, Lilium asiatic
  Clone ID: LIB3229-033-P1-K1-D8
ccgttgcagggtccaacgatctggcgtctccgcctactcgcccctcaactccggcaccgggagcttcagcgaccgcccgccgactgagatggcgccgctgttccccggttgtgattagcgagcactggctcattaatatggataagcccagcggcgagaatgcaccgaatagtgaaatgatcgatgtttatgttaagacccttgtcaaggttctcggatgtgaggaggaagctaaacataagatatacgatgtctcttgtgagagatactttggttttggatgcgagattgatgaggagacatctaacaagcttgaaggtctgcctggcgtactttttgtgctcccagattcttatgttgatgcttataacaaggattatggagcggagctatttgt

SEQ ID NO: 1778 - DNA, 373 bp, Lilium asiatic
  Clone ID: LIB3229-033-P1-K1-E1
tcgcttgggttggaaggattggggctctttttgcactgccccatacctgggggtacgttctattgtttttcatgtgttcatgatcattattcatcatgttgtgtatactaatgtgctcctgatgtatcttgttttggtccattgggtttcaagcccatagatgaggctaatgttaaatgccatcacatgaagcttgcccttgatagccaatttaattgatctgttaggcttgtctgagtcctgagtatatttagtggtatattgactctttcccaaacatcttacatcttttgatatttattggatgaaatatgtgcttagacttttatcattcatacttaacttggggtggtcatgctcagtttacattctt

SEQ ID NO: 1779 - DNA, 332 bp, Lilium asiatic
  Clone ID: LIB3229-033-P1-K1-E11
gtgagatgggcggcggtttcgaggcataggacacggagaaggcggcggtctcaaattagaggattggagttgtttctgggaaggcaatatttggaccccctttggaggaatactggacaaagaagctgggggaggaggcagcagcggcagcatctgcagtagtaacgaaggaaagtgatggacagaccagttagtaatgaagttcaatgcaaaagacacccatgtatttgtttcaagagccctgtaactgtatactgtttttgcatttggcttctgtgtcatctttgtctctgacatacttttttccgactatatagagtctagtgattggt

SEQ ID NO: 1780 - DNA, 342 bp, Lilium asiatic
  Clone ID: LIB3229-033-P1-K1-E2
cccaattcccccagcggcggcttttatggtgaagttcctgaagcccaacaaggcggtgatcgtgctgcagggccgcttcaccggccggaaggcggtgatcgttcgtaacttcgacgacggcaaccgcgagcgcccctacagccactgtctagttgtcgggatctctaactacccgaagaaggtgatccgcaaggactcagcgaagaaaacggcgaaaaagtcgagggtcaaggcgttcctcaaggtcgtgaactacaaccacatcatgccgactcggtacacgctggatgtggatctcaaggatgtggtgaccgtggatgccctgcagtccaaagacaaaaa

SEQ ID NO: 1781 - DNA, 226 bp, Lilium asiatic
  unsure (1)..(226): unsure at all n locations
  Clone ID: LIB3229-033-P1-K1-E3
ccggaacggaagggccgacccaacccacccgtgctcactaaccacatcgaccagcttagatctagcaacagcaacnaccngagggtgggcgtaaaaggtttatggttcgtaacaccccactagattctattgtgaattctagtgttctgtttcttttgtgctggttcgatgaattctttctggaactatggatctgcgttatgaggttaatatagagttttagatg

SEQ ID NO: 1782 - DNA, 112 bp, Lilium asiatic
  Clone ID: LIB3229-033-P1-K1-E5
ccggtacggaagggccgggccgagccacccggccggtgcattgcttgattcaagggttttttttcgctcatgccacgtcatagaggtgggatagtgtcacctgagttcaatt

SEQ ID NO: 1783 - DNA, 112 bp, Lilium asiatic
  Clone ID: LIB3229-033-P1-K1-E7
cgttctagaggtatccaagacttacgtactcgttcttgcaacgtcatgaactctaatatggtggcaattaaattcaatggactgtccgtcggtcgacaggctgtgatcgtgc

SEQ ID NO: 1784 - DNA, 198 bp, Lilium asiatic
  Clone ID: LIB3229-033-P1-K1-E8
gtggtcagcaggcagatcgaccagcttagtgcaagcaacagtaacgacttgatcttgtgcggagatggttgatatttcgttggaccccactagattctattgtgaattctagtgttctgtttcttttgtgctggttcgatgaattctttctggaactatggatctgtgttatgaggttaatatagagttttagatgac

SEQ ID NO: 1785 - DNA, 208 bp, Lilium asiatic
  Clone ID: LIB3229-033-P1-K1-F10
aaaaaaaaaaaaaaaaaaaaaaaaaaaaaaaaaaaaaaaaaaaaaaaaaaaaaaaggaagggaacaaaaaaaaaaaaaaaaaaaaaaaaaaaaaaaaaaaaattgttttgatccgggccggaaatttgcggggccggattgggccccaaccaaacaaacccgttggggcttgccccaaaattttcgggggttaaacaagaaaacccaa

SEQ ID NO: 1786 - DNA, 281 bp, Lilium asiatic
  Clone ID: LIB3229-033-P1-K1-F3
aaagaggagtatgattagtcttctttccagcactggtgtcctctgtagtgaattgtcttagttttgaaccactgtttgtggatgtgatataaggccctgggggacttacctattttgaatcagatattttaacttgcctcctgtgtagttctgagcttaaaacttatctagcatgtattgtgctatctgttgtacttattctcgtaactatcggtgcaatctttaattgttggtcatctcaaaggaaaaatatactgtgaaggcaccttaatcacaggggg

SEQ ID NO: 1787 - DNA, 378 bp, Lilium asiatic
  unsure (1)..(378): unsure at all n locations
  Clone ID: LIB3229-033-P1-K1-F4
cggattgcccgggccgcgccggcctacgcgttcggtctgattataaaaccaaatttttttttttttttcgatattaacctaggggggggggcctttctctgttattaaggggaaaaatcnnncnttccttttttggggcggccgttcttggggttccaggcttccgttcccgtgcttgcgccgtcttagcttttttttggtgtcccctaaattcatttttttctttggttccccgccttcccctgttgggttttccccttggggaaggcgtcctttttcgggtgcgttctcatattttgttccttttggggggggcttttccggggttgcccctttttttttgccttttcttttgggccccctgattggcgaatgggc

SEQ ID NO: 1788 - DNA, 95 bp, Lilium asiatic
  Clone ID: LIB3229-033-P1-K1-F5
gatcgagagctcccgctctcgtatttttacgctcacgtacacgtgcatgcgaggggataactctaatatagtggcacctaacattcaatatacaa

SEQ ID NO: 1789 - DNA, 427 bp, Lilium asiatic
  Clone ID: LIB3229-033-P1-K1-F6
cccacgcgtccggactcgcttgaggccgaagttgtatcattggtatctgagatcaaacagctgcgggctgcaagcactcaacaacttgaggatctaagccgcaatctgaacactgttaagcttgatgttgacaggctatcgtctgaaaaagaggagcttggtgctaaggtgaatgcactcatcatggatgtgaaatctcgcgatgaacgaataaatgagctgaatgagcacctgcatcagttgcatttggagcacgttaaactgatcactgaattagaggagactcggaaagaagctgtggggctgcgctcgagggtcagggagctggaggaggaggtggacaggcagagggtggtgatcttggacagtgctgaagggaagagggaggcgataaggcagctgtgcttctccttggagcattaccagg

SEQ ID NO: 1790 - DNA, 276 bp, Lilium asiatic
  unsure (1)..(276): unsure at all n locations
  Clone ID: LIB3229-033-P1-K1-F8
accgaaagtagcatcttcagcggaactcatccaaagcaggtcgattaaattgctggacgggcccaatgtcaaaagaaataggtttatggtttatgtcgtgaactgtctaatatttgtatcttattgtttaccgtctcagtggacctaaaattgtgagctagctntctaagatcctagggacctgaagtttattagatcctcgctttaactgtgtaaattatttgtttgatgtttgcaactgctatggttttggcaaaananaaaaaannnnanaat

SEQ ID NO: 1791 - DNA, 102 bp, Lilium asiatic
  unsure (1)..(102): unsure at all n locations
  Clone ID: LIB3229-033-P1-K1-G1
cccacacgttccaatctacctttcgtttccatgctacagtaaaaccacgggggaggacccacctattttaagttaattccccnctgtactccaacccccggc

SEQ ID NO: 1792 - DNA, 432 bp, Lilium asiatic
  Clone ID: LIB3229-033-P1-K1-G10
cggacgcgtgggtttgtgcagagagtggcgaaaaggcaatctcgatgctcatgccaccacataattttgatgcttgtttcatggatattcaaatgccagaaatagatggatttgaagctactagaaggatccgtgagatggaaaatgatctaaatagtcggataaagcacggagaaacattattagactcatataccgatatcctgcattggcacatacctatattggctatgacggctgatgtgatccaggcgaccaaagacgagtgctcaaaatgtggtatggatggttacatatccaagccatttgatggcgagcatctgtacagggaagtagctcgttttttctccgccaaaaagacttaacaagaaaattgattgcgaaatttgcaataatagaagagttcgaaactggagctcttatgcaggatca

SEQ ID NO: 1793 - DNA, 430 bp, Lilium asiatic
  Clone ID: LIB3229-033-P1-K1-G11
cccacgcgtccgcccacgcgtccggttaatttcgaccactggggatggaattggggatggggattcctcaaaggattaggattttggcctttaaagtatttcttctcttatactctagggtatgtgaatatggtattggtttaaggatcaatctctaaccctagatctggaaatggctcgtataggtaaggaattaaaaaaactcttaaaaaatgaaatcacgaaaggggactaaaatttctgggttcaatcttctaatcaaaaggataatcctcatgatcatgctaaacaagagtttagagctaataaaaatcccactgatatatcaaaagttcaatgttatacgtgtaaggagtatggccactttgctcatagttgtaccgctaggaaagcttctaagagacccactgaaaagaaaaatgccaacatc

SEQ ID NO: 1794 - DNA, 111 bp, Lilium asiatic
  Clone ID: LIB3229-033-P1-K1-G2
cccacccatccgccccttcatttttatcattctcactaacgcatacatgcggggggacacttaaatcttagtgtgacccaaatccaaaccacaggccaaattcttatcaac

SEQ ID NO: 1795 - DNA, 329 bp, Lilium asiatic
  Clone ID: LIB3229-033-P1-K1-G3
actgggagctacaccaatggggggctgcaaagctctttgatgcatgtgcccagatttggctctgacatgtctatggcagtatcacctgtctttgctcatgcaccagcagagaaaggtcttgccagctttgctatagattttctcatgggtggagtctcggctgcagtttccaaaaccgctgcagctcctattgagcgagtgaagctcctgatacagaaccaggatgagatgatcaagactggtcggctttctgagccttacaagggaattactgactgctttgctcggacaataaaagatgaaagtgtcatgtctttgtggaggggaaa

SEQ ID NO: 1796 - DNA, 165 bp, Lilium asiatic
  Clone ID: LIB3229-033-P1-K1-G4
ctgaaaaagaggagcttggtgctaaggtgaatgcactcatcatggatgtgaaatctcccgatgaacgagtaaatgcgctgaatgagcacctgcattagttgcatttggagcacgttaaactgatcactgaattagaggagacttggaaagaagctttggggctgc

SEQ ID NO: 1797 - DNA, 424 bp, Lilium asiatic
  Clone ID: LIB3229-033-P1-K1-G5
cccacgcgtccggttctatatggtcatgcagtgtcttggagccatctgtggcgccggtgtcgtgaagggttatcagaagacgctctacgagtctaacggtggaggtgctaatgtcgttaaccatgggtataccaagggtgacgggctgggtgctgagattatcggcacctttgtgctggtctacaccgtcttctctgctactgatgccaagaggagtgcgagggattctcatgtcccgattctggctccgttgccgattgggtttgcggtttttctggtgcatttggcgaccatccccatcactgggactggtatcaatcctgctaggagtctaggggcggttatcatctacaacaagaagcatgcttgggatgatcattggatcttctgggttgggcctttcactggagctgcacttgctgcg

SEQ ID NO: 1798 - DNA, 419 bp, Lilium asiatic
  unsure (1)..(419): unsure at all n locations
  Clone ID: LIB3229-033-P1-K1-G6
tgcttggcgatgaatacgggactgcgtcaaacatcaagagtagagtgaatcggcagtctgttttgggggccattacctctgctcagcagcggctgaaactatacaacaaggtccctacaaatggattggtgctgtacactggaacgatcgttactgatgacggaaaagagaagaaggttacaatagattttgaaccgttcaagcccatcaatgcctccttgtatctttgtgataacaagttccataccgaggctctgaatgaactattggaatccgacgacaagtttggtttcatagtcatggatggaaatggaaccctctttggtactctgagtggtaatacaagagaagtactacacanattcacagttgaccttccaaagaagcatggtagaggaggtcaatccgcattgcgattt

SEQ ID NO: 1799 - DNA, 61 bp, Lilium asiatic
  Clone ID: LIB3229-033-P1-K1-H1
aaaaaaaaaaaaaaaaaaaaaaaaaaaaaaaaaaaaaaaaaaaaaaaaaaaaaaaaaaaaa

SEQ ID NO: 1800 - DNA, 430 bp, Lilium asiatic
  Clone ID: LIB3229-033-P1-K1-H11
cccacgcgtccgatttgcagaggacattatccaggagcaaataacaggagtgctgttggagcgcctcatagtcaatcgccctcatccgtgggggctcctaatcacttttatcgagctgatcaagaatccgcgatatgacttttggagccggccattcacaaggtgcgaccccgaaattgaaaaactgttccaacaggtgtcacgatcctgtggtggtccaaagacaatagatgatggtatagttgctgctggcatgcctgatggtaatcactaaatcttgaaggctgtatatatatgtagtaacttaattctacaagggggcatgttaatattagattctcttggttgtatattaattactgcgaacatattgtgagatgatatactgtaattatgatagtcatttgatgtacatttgaatcttggcaac

SEQ ID NO: 1801 - DNA, 311 bp, Lilium asiatic
  Clone ID: LIB3229-033-P1-K1-H2
caagaaacttgcttgaatgaggatgggagtcttgaggccgggatcttgggccttgtatttcttctatatatatctagtccctgtgttcacttgttctttgagactgcatgattttagtgtggaatcttagaatgttttcagttgtggtagaggcctttgatacatcataccacactagtagttgcttaatgtgattgttatcagttgtggtagaggccttccagacatcataccagttttagtagttgcttagtgtgatgctttagtttaatttgaatttgttggagcatgctctttttaaaatggcaaat

SEQ ID NO: 1802 - DNA, 294 bp, Lilium asiatic
  Clone ID: LIB3229-033-P1-K1-H3
aagatagagtggataacatttgaaatattaacacctaccacttaataacaaaaagcaaatgggaggggagattctcatagatggatagaatggataggggtgacacctaattcgtagcacttacgcaaatgatggaagagaggctatccactcctagtagatagaccgtcacttatccatatggtcaccggccaacctgctgcgcagctagttactcagatgtggcagctccgccttccaagccacaggtgtgatcgcagtagttgacaatgagatcctgacaaatgtatagcg

SEQ ID NO: 1803 - DNA, 391 bp, Lilium asiatic
  Clone ID: LIB3229-033-P1-K1-H4
cgctcgcctatgaatacgggactgcttgcaacatcaagagtacagtgaaggggccgtcttttttgggggccattacctctgcttagcagcgtctgaaactatacatcctggtccctacaaacggattggtgctgtacactgcaaccatcgttactgatgactgaaaagagaagaacgttacaatagattttgaaccgttcaagcccatcaatgcctccttgtgtctttgtgataacaagatccataccgaggctctgaatgaactattggaatccgacgacaagtttgggtccatagtcatggatggaactggaaccctctttggtactctgagtggttatacaagagtagtactacacaaattcacagttgaccttccaaagaagcatgg

SEQ ID NO: 1804 - DNA, 168 bp, Lilium asiatic
  Clone ID: LIB3229-033-P1-K1-H5
tatttttttagatgattccattttactgttaccatcaacctaccacaggggacgaaacatatgaattttaaatcacatcaatagccacacacttacaactacacgtctctgaaaacacctcctttcccaaaataaacgctcttcactactaatccatataccctcact

SEQ ID NO: 1805 - DNA, 216 bp, Lilium asiatic
  Clone ID: LIB3229-033-P1-K1-H6
ggagcggcgttatagttttttttattatcaacgcaaaggagggggtgaaacaaagtcggactaacggtctttacctctttggggatttgaacttgtctttcgtctagctgattttaatttttttagaaaattaagataactccatgagactaagagtctacatatgctgttagtgatgtgatgttttgttctatgaatgcaatagagtttgacata

SEQ ID NO: 1806 - DNA, 143 bp, Lilium asiatic
  Clone ID: LIB3229-033-P1-K1-H8
tgcaataacctatcgtgtcgctccgtccgtctttggttgctgctgccgctctctatgctgtgctgagtactctcaacatgagttctctgtggactgagactctccagctccattgcggttatgcataaccacaggctgtcgat

SEQ ID NO: 1807 - DNA, 99 bp, Lilium asiatic
  unsure (1)..(99): unsure at all n locations
  Clone ID: LIB3229-033-P1-K1-H9
cccgctctagagcgatccaagggcttacgtacgcgtngcanntgcgacgtcatanngctcttctattagtgtnncacctaaagttcaagttcactggcn

SEQ ID NO: 1808 - DNA, 382 bp, Lilium asiatic
  Clone ID: LIB3229-035-P1-K1-A1
gccacgcgtacgtctcatgccagacgatatccaactcccgagccggatcctcaaagagaggcctagacacaccacctacatcaacgtactcatagttgttcctgatgcatggcatcgatgcaccccataggcgacatatatgtgatgctagtgaccgacaaaaaggctgatgggctggtccttttcaggcttatcactcgccaacccgtgattccagattcttatccatacattacaatcacaccattaataatctgataagtcatgataagttctaccatcaacaatccactgaagtgtcaaagcattcacatatcaacacagatgaacttgtctcacagttagccatattcgtcgatgtaagacacactatttcttcata

SEQ ID NO: 1809 - DNA, 317 bp, Lilium asiatic
  Clone ID: LIB3229-035-P1-K1-A11
atctaatggcggcgatcccgagactccccatcgccatagcggtgctcatcttcgccaatcgcctacctgccgcccaggcccaagctccggctccggcgccgaccagcgacggcacatcgatcgaccagggaatcgcctacgtgctgatgctggtggcgctggtgctgacttacctgattcatccattggatgcatcgtcgccgtacaagttgttctgatatttacattggagtagttgggaagtttgggtttgtatctggggtttggttgggttgtaattctgaagtttgtttttagatgatgagaaatttattctg

SEQ ID NO: 1810 - DNA, 335 bp, Lilium asiatic
  Clone ID: LIB3229-035-P1-K1-A12
cgcgaccggttagatgcctcatgtctacaagtccttcatgaccatgatccctcatgcttacgagaccttcattaccatgatccataaccaatctcaagcttggatcaaggtttttcgatcaaaatggtcttaagaggtcctattttttaacatgcacacttttcttttttattaagggacaattttttaagagttttgacttcaaacccattaacaaaatgatgttgcttaacacaatcattgtcatttttcggggtagattattttcactgcatctttcttctagacttaccaatggtcttatcaacatcacacccttttgttcttattacggt

SEQ ID NO: 1811 - DNA, 397 bp, Lilium asiatic
  unsure (1)..(397): unsure at all n locations
  Clone ID: LIB3229-035-P1-K1-A2
cccacgcgtgcgctgagtctgtcccggggttctgttgccatgaagttgagtcaagaacgaaccttgtctaacagtctttgctcactggtgaagactagagagagaacaagagcatgcaccgaccactgttggtggttcgggcattgacttgggttctagtagcaatgggccttgggactggctttcaggttaattttaaaaaatgttggggtgtgactctcaaagggagttttggctgttttggctaattatgtgttgttatggtactgttttgtagagtgaagcttgtgggatgggatactgtattttctctcctggtgaaatggttaattattatattttggttatttgtcaaanaaaaaaaacactattcttttaaattttcttcccttaatat

SEQ ID NO: 1812 - DNA, 410 bp, Lilium asiatic
  Clone ID: LIB3229-035-P1-K1-A3
gcatgcgctccagcgcgtgcgcccacacatcgagagagaccggctgtgttagtaagggccgaacgttggtagaagaagcacgtcaagcgaacgaatgtcagagattattgtatcatgcaagagcccatgtgtcgagagagtcgatcgtgactcaacgtcggtaagggccgaaccaagttgaggactgaacgttggtagagaccggatgtgccagtaagggccgaaggtcagggaagaaacacgtcagacgaatgaacatttgagattaccggattatgtcagggcccgtacgtcgagagagaaccgatcgtgtctgttcgtcggtaagtgccgaacaaactggaggaccgtacgtcggtatccctggtggtatcatcggacaggaggtggaactccctggatcttagggg

SEQ ID NO: 1813 - DNA, 267 bp, Lilium asiatic
  Clone ID: LIB3229-035-P1-K1-A4
gagatgagtaggaagcagtcccaggctcaagaggcttatgatgaagatgaggacatgccgggaggtgctcaaagggtgcagtgtgctcagcagtaaggagatgatgatgatagctggatgtttaggatctgaatatgctgtcagttaacttttatccactctatatttttatggtatatcataattgtcccctcgttcagtcgttacagatctgaacttgtaacttcttgcttaagactaccttggttttataagtttggtattctg

SEQ ID NO: 1814 - DNA, 387 bp, Lilium asiatic
  Clone ID: LIB3229-035-P1-K1-A5
cggacgcgtgggcggacgcgtggggcagagttttgaagctttgaacccaagggctgtcgcagttgttgtagaccccatacagagtgtcaaggggaaggttgttatcgatgccttccgtttgattaacccgcagactatgatgctcggtcaagagcctcgccagactacctccaaccttggacatctcaacaagccatcaattcaggcattgatccatgggctgaaccgtcactattattctattgccatcaattaccgtaaaaatgagctcgaagagaagatgctgctgaatctacataagaggaaatggactgatgggttgacattgagacgcttcgatacccattctaaaaccaacgagcagacagtgcaggagatcctgagtct

SEQ ID NO: 1815 - DNA, 330 bp, Lilium asiatic
  Clone ID: LIB3229-035-P1-K1-A6
cccacccgttccgggacgaccaaacgcagcgtaccctatctttttgttcgaggagatggcgtgattctagtatctcctcccctgaggacagtgtaatagaagcttgctgcagtagtggtgaatgattttggttacatggattggtttgattgatctgtagcctgtgtcaagtgaagtttactttgaggtctttacagttgaattgtcttaatgctgaagtgttgcaactgttcggtttcccttttaatggcagtagattatgtctactgtatatttcgtctaaatgtttaagggttgccgtttacataatgcagtgatttaagtgtgcta

SEQ ID NO: 1816 - DNA, 284 bp, Lilium asiatic
  Clone ID: LIB3229-035-P1-K1-A7
cccacgcgtacgttgtgtttgtcccggagttctgttgccctaaagttgactcacggactaacctctattgacacaacataatcacttgttgacagatggtgtgtagaagacaagcatgtacgcggccactgacgcactctccaatcattggcctgggcgagacgataatatgtgccttgggacaggatgctaggtttattgtggcaaaaggcctggatgctctctttaggggcgctcagccaattattgctggatattagttgtgatggctcatatttgaacaa

SEQ ID NO: 1817 - DNA, 333 bp, Lilium asiatic
  Clone ID: LIB3229-035-P1-K1-A9
cccacgcgtccgggatttactggaccaacctaatcctgcggatccagcacagaccgagggctatcagctctttgtccaggatccagtagagtacaagagacgggttctactgcagaccaagcagtacccacctactatctaatgtcacctgctgttaggtctggcacctaaaaactagcaaagtctcggttgttagagcatctgtatggtcaagtaatttggtggttcgacatctttaaaatgacttgtgcattgtagtagtgtcttttgaactgtttcaggagtctaaatactcttgataagaattatggtgttaatcggttcttctttgtt

SEQ ID NO: 1818 - DNA, 376 bp, Lilium asiatic
  Clone ID: LIB3229-035-P1-K1-B1
gccacgcgtccggcctttgatcagattggccttgcacaaaagcttgaaaaacatgaacttcttgagatgaggcgtgttgcgtcatatatttataagaaagctgggagatggaaacagtccattgcactgtccaagaaggataacatgtacaaagatgctatggaaacaggttctcaatctggtgatcgggagcttgctgaggagttgcttgtttactttgttgagcaggtaataccattgtttgcttacaccgtgcatcagtagtctaatttggttgcaaagatttcggctaaagttggtgtatttgtagtttgcagaatgtgtatattcgataatcaaatgtctttaatttttgtttagtctgtctgttgcatac

SEQ ID NO: 1819 - DNA, 339 bp, Lilium asiatic
  Clone ID: LIB3229-035-P1-K1-B10
ggatgtacaagatgtggatggatagcatgaaggaaggactcggttttgaaggtacaagattaaggaggctataaaatggaaggactagcagagcataaaaaaatatggtctcctcttcgagggagagctagctatatataggagctgagtctggtcttattttttagggagagtacttatctcttctctgagctatctacttcaagtaggaattgagagattctgtgtgataatgattatgtgagttctaagtgcttgtgtgaatgttttgatgaataaagagataaagcagttccttagatatgtgagatctcttcaattaataaaaaacttattact

SEQ ID NO: 1820 - DNA, 388 bp, Lilium asiatic
  Clone ID: LIB3229-035-P1-K1-B12
ctcgctgaggtccccaccatcgccatcgacctcgtcgagatcgaggccaactcctccgtcctcaacgacgagttcctcgcccaccgcctcggtctcatccccctcacctccgacaacgccatggccatgcgcttcgcccgcgactgcgacgcgtgtgacggcgacggccagtgcgagtactgctccgtcgagttccatctcagcgtccggtgcgattcggaccagacgctcgatgtcaccagtgcggatctgacgagttcggatccgattagggttgtaccggtggacgtggccgcgaggacgcttgctggggattcagccgatgctaagggcatactcattgtgaaactccgtcgtggacaagaattgaggctgagggccatagcca

SEQ ID NO: 1821 - DNA, 288 bp, Lilium asiatic
  Clone ID: LIB3229-035-P1-K1-B2
gaggaaagatggttatcttaagaagttaaagccggtgattgttcatgttaattaccatcccgataagctgtggagaatgaaagctatagtggagttctatgtcgatggaaagcaagatgctctagattcgttccccgacggatcgagccggtgaagtttctttctgattgttagtctcagaacttgctatacaaagtttggttttaacattagaacgtagtttgttacattgtcacctcagctcttacacggtaagaatgatcttgaaaggatgtgttgtctgaacaa

SEQ ID NO: 1822 - DNA, 288 bp, Lilium asiatic
  Clone ID: LIB3229-035-P1-K1-B3
gaggaaagatggttatcttaagaagttaaagccggtgattgttcatgttaattaccatcccgataagctgtggagaatgaaagctatagtggagttctatgtcgatggaaagcaagatgctctagattcgttccccgacggatcgagccggtgaagtttctttctgattgttagtctcagaacttgctatacaaagtttggttttaacattagaacgtagtttgttacattgccacctcagctcttacacggtaagaatgatcttgaaaggatgtgttggctgaacaa

SEQ ID NO: 1823 - DNA, 389 bp, Lilium asiatic
  Clone ID: LIB3229-035-P1-K1-B4
gcgatgtctaagaagaacaatctcaaaacgaggaagaggcagcacgatttcgagctcacgagagagaaagaggagaaggagaaaagggcgcagaagcttcaagcaaagaagtccaagacgaaggtcgctggcagtgaaaagaagaagaagaatcccgctgggtttcatgctgagaaaagaaagctgaagaccaaattgtcggcattggcaaaagctaaagcagcacaagcgacggaggcagataattaagtgtcaggttactactgtcttttcaggcatatgcaggaccatcgatctgttatagtataatagcaccgatgtggctcttataacgacctacacgagatgctttaagcatatgcaataccacgggctttgtatgattaaaa

SEQ ID NO: 1824 - DNA, 393 bp, Lilium asiatic
  Clone ID: LIB3229-035-P1-K1-B5
gccattttgcatccagaacaagatagagtgcttactgtccgtgagaatgcaaggctgcaagggtttccggactattataaactttatggtcctgtgaaccaaaagtatatgcaagtgggcaatgctgtggctgtgccggtggcgagggctcttggatatgggttggggttggcccgccaaggtttaggtgatgatgatcttccggttttctctctgcctccgacttttccaaaacctgcggtaaggtcgtctgtcgttgtggaaactgtggagggatgagatctgttgctggtgaggggcagcgtcgctgttgaaggctgtttttaagttatgttttgtgcttttttatttttcttgggttaggatattgttattattggctaaagtgaccgg

SEQ ID NO: 1825 - DNA, 366 bp, Lilium asiatic
  Clone ID: LIB3229-035-P1-K1-B6
cgaaaaacacgctcaaacaatcatcaagcaagccggaggtactggtatccaatgctattattcatgacaagtctattgtcaaatttgtcaatcctgatactcataatccatccaggtcagaattttttactgcttgtgtggaaactcaactaatcacttttctgcccgagatggaagttcttgtatctgcaactactatgcctgctggaaataatgtgaatgatgatgttgagaatgattcagatgattcataagatgggaagccatctgctgctaggtttcagtccaagttcaattctggtgcaccaactattaagccatctgatgcagaagaaaagccttcacttgcttctagagtgctgtaat

SEQ ID NO: 1826 - DNA, 328 bp, Lilium asiatic
  Clone ID: LIB3229-035-P1-K1-B7
cccgcgcgttcgttctttgatcaagttgaagccgcacactggccatgataacatccactccttgagatgaggcgtgttgcgtcatatattgataagatagctgggagatgggaacagtgcattggactggccaagaaggatatcatgtccatagatgctatgtaaacaggttctgaatatggcgatctgtagcttgctgtggagtagcatgtttactttgttgtgcagcgtaataccactgagtgcttacaccgtgcgataagatgtctaatgggggtgcagagtgtacagctaaagttggtgtattggccgctcgcctagtgtgtat

SEQ ID NO: 1827 - DNA, 289 bp, Lilium asiatic
  Clone ID: LIB3229-035-P1-K1-B8
gtaggaaagatggttatcttaagaagtttaagccggtgattgttcatgttaattaccatcccgataagctgtggagaatgaaagctatagtggagttctatgtcgatggaaagcaagatgctctagattcgttccccgactgatcgagccggtgaagtttctttctgattgatagtctcagaacttgctatacaaagtttggttttaacattagaacgtagtttgttacattgtcaccttagctcttacacggtaagaatgatcttgaaaggatgtgttgtctgaacaa

SEQ ID NO: 1828 - DNA, 385 bp, Lilium asiatic
  Clone ID: LIB3229-035-P1-K1-B9
gtggcaatggcggaggggaaggggtcggccctcgtccacctcctcgttatctccctcagcctcaccgccttcggcttctcgatcgccgccgagcgccgccgcagcacaggcacaatagttaccgacaatctgaatgcgacctactgtgtgtatgactccgatgtcgctactggttatggagtaggtgctttcctctttctttttgctagtgaatcactactcatgggcataacaaagtgcatgtgtttcggccttcctttagcccctggcagtagccgtgcttggaccatcatttattttgcttcttcgtggctcaccttcttggttgctgaggcttgtattctcgctggtgctacaaagaacgcctaccatacgaaatacagac

SEQ ID NO: 1829 - DNA, 307 bp, Lilium asiatic
  Clone ID: LIB3229-035-P1-K1-C1
cccacgcgtccggtctctgatcaacaaatctgcgaaggagtgaactttggtgggtggatctagttgggtgtcttagttatgtgtaggtgtatctgtggttgtgtcctgtttctgttatgggttgttggttgttggttgtgttggatctgatgaattgtggtcgtttaatttgtatggagacttggtttaatggtgctagttggttaaaattgtgaattctcgagtattgttgggtttagatttggtactagtagttgatgtaatctgtggaaaaccatctgggttttgttgaatcaatttcatggaa

SEQ ID NO: 1830 - DNA, 386 bp, Lilium asiatic
  Clone ID: LIB3229-035-P1-K1-C10
cccacgcgtccgcgagagtggagctatgcccgaggaccagggccttgctagatcattgcagaggcgagcagtcaggtactccgtcctgggagggatcctttatcgacgatcccacaacgcgcctctcctaaggtgcgtccgaccagaggaggtaaaaaggatcctgactggagtacacgaaggaatttgcggcggccaccccggagctcgcacattggcaaacaagatattgttatgcggatactattggcccagcttgcgtgaggacgcgaaagcccatgtcgacatctgcgacaaatgccaatgctacgcgggcattccaaggctgccctcgaccaagcagaaatccgtggtcgccgcatggccattcgacatgtaagggatcg

SEQ ID NO: 1831 - DNA, 214 bp, Lilium asiatic
  Clone ID: LIB3229-035-P1-K1-C11
atatgtctagcagtgaaacaactaattctttgatatcggtttgccccgagtgaaatgattctactggttaatttaatgtttggtacttttttttgattgtacctgtagaatcatatgtttcgaggaaaaatctttcaggaaaacaattttgttcggatatggataggttagatactgaagtaaaatttaaatttgaatgaggcagcaatttgtt

SEQ ID NO: 1832 - DNA, 359 bp, Lilium asiatic
  Clone ID: LIB3229-035-P1-K1-C12
ggtcatcatactttttgagctcgacaccaaacccaaatgtgcttgtgggggcggtggttggtgggccaagcaacgccacagatgcttttccggactctcgagcggcgttccaacaatcggagccgactacttacattaacgcaccacttgtcggacttcttgcctactttgcagcccactcgtgatggtggtacattaatttggtggcggtgtggattaataattgcatttaatgtagtgatggaagctatgagccactacatgtcaagtgtgctttgtgaagcatgaggttcattgctattttagtcattcacgaagggatggtggtgcattaatttggttgcggcgtataatagtaa

SEQ ID NO: 1833 - DNA, 131 bp, Lilium asiatic
  Clone ID: LIB3229-035-P1-K1-C3
cccacgcgtccggtctctgatcaacaaatttgcgaaggagtgaactttggtgggtggatctggctgggcgttttagatatgtgtaggaatatctgtggttgagtccgggggcatgttatggattttttttt

SEQ ID NO: 1834 - DNA, 216 bp, Lilium asiatic
  Clone ID: LIB3229-035-P1-K1-C5
cccacgcgtgcgttggccggagacgaagctgtagaaagagccggatcggcaagctcctttccccgttgcggactactgggtctttgccgcatttatggcaagtactgcatgctttatcattgtcagctgtaatgacgtgcctatatacgaagctgaagtcggttctgccgctggagtacacgaaggtgaccaccagcaccagctcatattgcatgc

SEQ ID NO: 1835 - DNA, 440 bp, Lilium asiatic
  Clone ID: LIB3229-035-P1-K1-C6
tgcacgcgtgccgtaccggtacggcatggccgggccgacccgtccgcccacgcgtccgttgtttggaaggaagacaccctatagcactgttattgatggggagcaggcatgacagtctctaattctagtagtagacagtggagcatgctcagacaatgaaagcgtcagttcatgagacagggacaataactagtagttgaagacaacttctcgatcactctctctcagtctctctcaatgtagcccaaggcagaagacaagagggtagctcaagggaacatctagggtggctggaggagtctctcttgatggctctgagaagactgtggaaggcactagagcttgaagaattcatcctatatatacagaaccctctcctctattgaagccaaatatccccattattgagattcaaatcttattgggagcatgcagtcatc

SEQ ID NO: 1836 - DNA, 236 bp, Lilium asiatic
  unsure (1)..(236): unsure at all n locations
  Clone ID: LIB3229-035-P1-K1-C7
ctcaagtggaaggaagagaggccaaggtttggtaccagtgagtactcggcttatagcactgaaccaagcacatattctcagtgattgttagtaggaatatgagtgtgtaattagccttttttttcttcttcttatttgtaattttttaccgtgtgtatttattatttttatccgtgaaattagaagtgttaaaaacatcttaggccttgagtggttactagtgacaaagttgntct

SEQ ID NO: 1837 - DNA, 383 bp, Lilium asiatic
  Clone ID: LIB3229-035-P1-K1-C9
cttttggctttgacagggttgcttatttttatgcttttcttcttggtagcaacggtcaacgctattatcgtcgccttcttaatatctttggcagctgctggagggtttttagctcttttctttgcatgcttaactgcggtttacattggagctttgtcagctgcaatctttgtgatctctgcaacaaccatctcaacaattattggtgttgttattactacagggtggcttggattcttctgtgtcgtctggttggccgctaagaaaagtgttaacctcacgaagaaatcgctgaccatgacaagttcagcaatttcagcctattccaccgctcggcaagctagatcggaggcaccggtgaagtctgctgattgaaagcaatg

SEQ ID NO: 1838 - DNA, 392 bp, Lilium asiatic
  Clone ID: LIB3229-035-P1-K1-D1
gcggtgctcgcggaggctaagtctatcaagatcggaccacctccgcctccatctggcgggctacctgggacactgaactccgatgaggcaagagacttcgaccttccattaaaggaacgattctacttgcagccactgccaccagctgaagctgcagagagggtaaaggcctccgctaaggagatcctgaacgttaaggaactcatcgacaagaaagcgtggccatacgtccagaacgacctccgactgaagtcctcctacctccgcttcgatctcaacagcatcattgctgccaaaccaaaggaagagaagaagaccctgaaggagctcgccggaaagctttatgccacaattgatgaactggatcatgctgcgaagataaagagcctcga

SEQ ID NO: 1839 - DNA, 151 bp, Lilium asiatic
  Clone ID: LIB3229-035-P1-K1-D10
gatatacttgacttggcgatcgatcgagttgatcaagttgttattggtacatgatgtcactagctcatattatttgtagatgacttgagactatttatctttttagctgatggaatgtgccgatacctttttaatctaagaaattagctcc

SEQ ID NO: 1840 - DNA, 388 bp, Lilium asiatic
  Clone ID: LIB3229-035-P1-K1-D11
gatatacttgtctggcggcgcgatggaattgaaccctagggtttccagccaccgccggaagagccgctggctcacttcaccgacccctccatcgttcgccgcgtactgatgagcgcccccctctccttcgaccttcgcaacaagttcaacgtccgctccatgccggttcgcaaggacgacgaggtccaggtcgtccgcggcaccttcaagggccgcgagggtaaagtcgtgcatgtctaccgccgcaaatgggtgatccacgttgagcggatcactcgcgagaaggtgaatggctccaccgttaacgtccgcatcaatccctccaaggtcgtcgtcacgaagctgaagctggacaaggatcgcaaggcgttactggaccggaaagcga

SEQ ID NO: 1841 - DNA, 389 bp, Lilium asiatic
  Clone ID: LIB3229-035-P1-K1-D2
cccacgcgtccgggtgagggagtcatggagagtgagagggctgttctcctttgctttcttttagtaggagtgttcagccaaagctatctaagtgtggccatgggtaggggccttgagagcttccatgatcagaagaactactactctcctgacccacataccacaaccccaagtcctccaaagcatacagatgatcgtgtgaagccggaatgttcatgccctacacctccccgcggtggctatggaggtgcacctcctcatcacggcggcggaggaagccatataactacaccaccatctcacggtggcggaggctactacaccccttcaccagtacctatcatcgtcaccccgccgtcttcaccgctcgtcaacccagggacccctta

SEQ ID NO: 1842 - DNA, 379 bp, Lilium asiatic
  Clone ID: LIB3229-035-P1-K1-D3
cccacgcgttcggaagggggagcaatggacagtgggagggctggtctccagagctatcgggtaaggggacagtgcagccacagctatctaagcgtgagcatggatatgtgcctcgacagctgccatgaccataagaactactactgtcctgacccagataccacaaccgcaagctctccaaagcatacatatgatcgtttgttgccaatatgttaatgccctacacctgctccctgtggctattgaggtgcaactactcataaacgctgcggatgaagccccttatctacaccaccatctcacggtgtcggaggctactacatcccttaaccagtacctactatagtgaccgcaggcgcttcaccgatcgtaaacccag

SEQ ID NO: 1843 - DNA, 245 bp, Lilium asiatic
  Clone ID: LIB3229-035-P1-K1-D5
tcctatttttccgtggcaccagcctgcgtattaatttttgttgcagttaattctctccggggatgtggtgctaatcaatgaggctgtctacgaagccatgttcttgaggaaggacaaaggcagaatacctacttctatcatagtatcctcctctctactagatatatttgcatgtctgcttccaatattttgaagtggttccattaaatggaggttatactgagagtagctattatcgcataaaa

SEQ ID NO: 1844 - DNA, 346 bp, Lilium asiatic
  Clone ID: LIB3229-035-P1-K1-D6
ccaccgtacgcatttttgttgcagttaattctctccggggttgtggtgcttatcaatgaacctgtctacgaagccatgttcgtgaggaaggacaaaggcagcatacctacttgtatcatatctcactcctctatactagttatataaccatgtttggtcccaatattgcgcaggggttacataaaatgcacggaatactgaaagtagctttcctcgcgaagaaaagcgattataaaaaggggcggacgatctctaatatccaagcttactttcgcgagcttgcgacgtcatatctcttatatagacccacctaaagtcaattacctgagcgtccttttacgacgcg

SEQ ID NO: 1845 - DNA, 384 bp, Lilium asiatic
  Clone ID: LIB3229-035-P1-K1-D7
gctacatcaacttataattcttgggttccttgctaagacggtcttcttccataaaagaacacacatcagagaattggtggatggagttatctttttgggtgccatgtttcttggccaagttactcatctttttaacataattattgaactagcaatgggcattgaaaagcacatgaatcattcagttcacacggagagttaaacatgttttacctcaagatgaagggcgattatcacaggttggcgacgattacttatcgatgacataattttgagaatatgactgtcttctattctctataggtacctaacggagttcaagacgggagcttacatgaaggaggcggctgagagtacactttttgcgtataaatcagctcagga

SEQ ID NO: 1846 - DNA, 387 bp, Lilium asiatic
  Clone ID: LIB3229-035-P1-K1-D8
ctgtgcttagactacaggaacagcaccgagcccgagcctggtcggtgccgtcgtactgacggcaagaagtggcggtgctcaaaagacgttgtgcctgaccacaagtactgtgaccgccacatccaccgcgggcgaaaccgttcaagaaagcctgtggaagctactgctgctacacctatggccattgcggttcctaatgccggtgggcttcggcttatggctgccatcaccaacagtaagtcgagttcaagcagcaatggaagtagcagaaatgagtctccaacaaggctgggcttctctccgtccagcgtacttggtggtgaccgcgaagcaagtaaaaatgtcgcctcttgagttatctgacaaactcctggatttttggttttg

SEQ ID NO: 1847 - DNA, 388 bp, Lilium asiatic
  Clone ID: LIB3229-035-P1-K1-D9
ctgtgcttagactacaggaacagcaccgagcccgagcctggtcggtgccgtcgtactgacggcaagaagtggcggtgctcaaaagacgttgtgcctgaccacaagtactgtgaccgccacatccaccgcgggcgaaaccgttcaagaaagcctgtggaagctactgctgctacacctatggccattgcggttcctaatgccggtgggcttcggcttatggctgccatcaccaacagtaagtcgagttcaagcagcaatggaagtagcagaaatgagtctccaacaaggctgggcttctctccgtccagcgtacttggtggtgaccgcgaagcaagtaaaaatgtcgcctcttgagttatctgacaaactcctggatttttggttttgg

SEQ ID NO: 1848 - DNA, 390 bp, Lilium asiatic
  Clone ID: LIB3229-035-P1-K1-E1
cccacgcgtccgtttgcacgaacccgccagaatcatgccgaagcagatccgtgagatcaaggatttccttctcacagctcggaggaaagacgcccgctctataaagatcaagaggagcaaggatgtcgtcaagttcaaggtccggtgctccaggtacctctacacgctctgcgtgaatgatccggagaaggcggacaagttgaagcagtcacttccgccaggtttaagtgttcaggaggtttaaggtatcactctgtctgcagtttgggggaagctggccctcatctcaacctaatcttagtagttcttagcactatgcgaaccttttcttttcagcaatgaaccaagagaattatgtttccagatatttgattatatatccttgttttg

SEQ ID NO: 1849 - DNA, 394 bp, Lilium asiatic
  Clone ID: LIB3229-035-P1-K1-E12
cgacaagacgcatctcagattcctcatctggtgaaaaagttatcagacagtgaaaacaagaggacacctatgttaggaaatgtaatagatgattcaccgtatcaaactttcattaagaaagatgcagaaaatgaagaatatgataagaagctggacaatgcttcagaagatagtcatctctcgctaagtgattacggaacagtcgttgtacggtctccaaaagaaacttctgtatatacagcattcagcaatcacgataaaaagcctgtccgcagatattctgaagatgtctctgttagtggcacagttgttcttcgtaccgatcctgatgagcctgacactcctcgagcttcacaatccagattgggtctccaggaaaaatcatcaattgcat

SEQ ID NO: 1850 - DNA, 394 bp, Lilium asiatic
  Clone ID: LIB3229-035-P1-K1-E4
ctcatttcgaactcagagagagagagctgaagagatggaatctggaaagatagccaagggtgctgccggccgcaagggcggcgcaaggaagaagtcggtcccgagatccatcaaggctggcctccagtttccggtaggccgcattggccgctacctcaagaagggtcgctatgcaaagcgtgtaggctctggagctcctgtctaccttgccgccgtgctcgagtaccttgctgctgaggtgctggagctggctggcaatgctgccaaggacaacaagaagtctcggatcatcccgagacatgtctgccttgctgtcaggaacgaccaggagctgggcaagctgctcgctggagtcaccatctcccatggcggtgtcatccccaacatcaacccg

SEQ ID NO: 1851 - DNA, 293 bp, Lilium asiatic
  Clone ID: LIB3229-035-P1-K1-E5
cccacgcgtccggaaactctgaacagtgtttctgctggaaagatatatgctgggattgagagagcacgtctggtaaagaagcttgccaaaatcaaagaagaacagggtcttattgccgtggccgctgatttgatgcaagaaatggctgtggtaacatttggagcgatggccaagacagaaaaaatagctttgatcctcgatcaagatcgcttgcgcttagatcgccaagactatatccgagcacagatcctgtcaagaaagattagtgcccgagtttttgacgcagatactac

SEQ ID NO: 1852 - DNA, 397 bp, Lilium asiatic
  Clone ID: LIB3229-035-P1-K1-E6
cccacgcgtccggcccgggagttgtgtcctgtgctgatattcttgtactctccggtagggatggcattgtcgcggttggcggcccttacattccactcaagaccgggaggagagatgggaggagaagcagagccgagctgctggagcagtacctccctgaccacaacgagagcatctcgtccgtacttgacaagttcggcgccatgggcatcgacaccgccggtgtggttgccctcttaggcgcccacagtgttgggcggacgcactgcgtgaagctcgtgcaccgcctctacccggaagtagacccagagctgaacccggaccatgtaccacacatgttgaagaagtgtcacactgagatcccggacccgaaggcggtacagtacgtccgcaacga

SEQ ID NO: 1853 - DNA, 359 bp, Lilium asiatic
  Clone ID: LIB3229-035-P1-K1-E7
gttatttatatactttttaacactaagatataagagaaaactgaaaattaatatttaatttttgatatttttatttttttttcaacatctaacacctgagcacgttttataatgtcttaccaaataatccctatatgcacttctcaacattactatgattcttctctaaatccagtttgtgttcattatacatttttatgtataaaactcaaaatagaaatatttaatccgtacctcaaataaaacataaaaatctaatttaattgtattatatctaggacttaatgtaatggagtaaaataatttgtaagtgatgaagatacaatcacttttttatataaataaattggcacttagtc

SEQ ID NO: 1854 - DNA, 364 bp, Lilium asiatic
  Clone ID: LIB3229-035-P1-K1-E8
gttatttatatactttttaacactaagatataagagaaaactgaaaattaatatttaatttttgatatttttatttttttttcaacatctaacacctgagcacgttttataatgcgttaccaaataatccctatatgcacttatgaacattactatgattcttctctaaatccagtttgtgttcattatacattattatgtataaaactcaaaatataaatattttatccgtccctcaaataaaacatagaaatctaatttaattgtattatatctaggacttaatgtaatggtagaaaataatctgcgagtgatgaagatacaatcacttttttatataaataaattggcgcttagtctaaaa

SEQ ID NO: 1855 - DNA, 385 bp, Lilium asiatic
  Clone ID: LIB3229-035-P1-K1-E9
cccacgcgtccggcaatccctacggcgcttttctcctgaacttttggtgcaggacttgagtgtcagacatgcagtttccttgctacctcccattatcctttaccatggaacgggagactattctataccatcagctgccagtaaagattttgctgatgtccttgaaagtgttggtgctcaagttaagctactcttatatgaagggaaaactcatacagacttgtttcttcaggatcctcttagaggcggtagagatgagctgcttgaagacattatatcggtgatccgtgcgagtgatgcagctgaacttattacagattttgtagcgcctctggcacgccggcttgttcctgagttcatcttgaagttggctagtcgaataagt

SEQ ID NO: 1856 - DNA, 388 bp, Lilium asiatic
  Clone ID: LIB3229-035-P1-K1-F1
ggcggaaattacgaagagtacaaacaaggcagttactcatcaaactcaacaaaatgttcgtgcagtccagtcacaaaatcagaatcctgctgtacaggttccacaattacaaaggcacatacatccccaaatgagtatgttcaatccaccgaacctgacccttcaacagcagcagcagctactatggcgtcgccaagcagttattcggggctctcaaatggcgatggacaaagacaagaccccatctgatgtgaagaatgaaaacacgggggattcatcaatggatgggacatttaaacatcaaatgcagatgcgatatcctacaatgacaaataatcagattcactcaggccagcagctcaggcagctacctcctgctcaaattcct

SEQ ID NO: 1857 - DNA, 373 bp, Lilium asiatic
  Clone ID: LIB3229-035-P1-K1-F10
ccaccttccaacaactccacaaccaccttcaccctccaacaccggcaaaagcttcatcaaggtacatctatctactctcttgtcccctttatgtcttatttggattgttatgtgtaggattttggaaaagcttggatttgtgtggcaaaatgaggaaaggatcaaagcttaagaaggaaaagagatgttgcaagcttgatgaggatgtgctctcggatctataagtacccctccacccccattggattggagtaagaggtctcactccggaccgagtgggggagggcacattgttggccgtctttctctcggttttggaggaagcacattgggagagcatctacaagtgattttggagtgcagagttcatcat

SEQ ID NO: 1858 - DNA, 393 bp, Lilium asiatic
  Clone ID: LIB3229-035-P1-K1-F12
cccacgcgtccggccgacagcgccgtcgatcgctacatcgagaagtacatcgagaccagctccgtcgagcccctcttccacgtctgcatcggtggcatgatcttctcgtacctggtggcgctccccgaggagcgccgccatctggagcatcagcagcagcttgccgccggcggcgggggcggccaccactgaagctgatgcgtcagatctcaggatggagtggctggaggtgacgactggctgtccgtaaaaatatgatttgtggctgttttgttagattttgctcccgaaataagttcagcttgcttttgactgataattttctgtaatttctatctgcagagtcatgttataattaacaatgatttatgttgtcattttgatgttaatggc

SEQ ID NO: 1859 - DNA, 392 bp, Lilium asiatic
  Clone ID: LIB3229-035-P1-K1-F3
gcaactcagtctggaatgagcaaggtgttggaggaccaatcttttgtttcgtctatccttaattcacttcctggtgttgatcctaatgacccttctgtgagagatttcctttcatcattgcaaggtcaatcagagccccaagagaagccaaatgaagagaagccaagtgaagagaagcctgaaaaagaaggggacaattagattttgctctgaacatgctcgtgcctacttgttctccatggtttgctgtgcgtgatagatgatagaggcacttgacgactaggaaaagtgccacgattcgcttcatgtgtggaactagaagcatgagtgtgctcttttaactcaaagaaactgtctcattcttaaaaaaaaacttgaaaggaactgtattg

SEQ ID NO: 1860 - DNA, 401 bp, Lilium asiatic
  Clone ID: LIB3229-035-P1-K1-F4
cccacgcgtccgcggacgcgtggggcacaagggcctgcccccgaccttcaagaaacttcttctcacccagctgaagcggttcaccgctgccggtaagctcacgaaggttaagggctcctacaagctcgccgacaaaccgaagaaggccacgaagcctaaggccaaaactgctgctaagccgaagactgcaaagcctaagacggcggcaaagccgaagaaggcggcagctaaacccaaggcaaaggcccctgtcaagccgaaggtgaaggccgctgcgaagcctaaggctgttgccaagcccaaggcgaaggccccagctgccaagccgaagcctgcgcccaaggctgcggcgaagccgaagccggctcctcggccggcgccaaaggctcgccctgcaaagg

SEQ ID NO: 1861 - DNA, 397 bp, Lilium asiatic
  Clone ID: LIB3229-035-P1-K1-F5
accgccgccgtcgtcagccatggtttccggctccggcatctgcgctcgccgcgtcgtcgttgatgcccgccatcacatgctcggccgcctggcttcaatcatcgccaaggagcttcttaacggccagcgcatcgtcgtcgttcgctgcgaggagatctgcctctccggcggccttgtccgccagaagatgaagtacctccgcttcctccgcaagcgcatgaacaccaagccctcgcacggccccatccatttccgagctcccgcaaagatcctctggcgcaccatccgcgggatgattccgcacaagactaagcgtggtgcggcggcgctggcgaggctgaaggcgtacgagggggttccgccgccgtatgacaagacgaagaggatggtcatcccg

SEQ ID NO: 1862 - DNA, 307 bp, Lilium asiatic
  Clone ID: LIB3229-035-P1-K1-F6
ctgttttcgtgtgaaggaaggggatcatgtcatcataggccaatgcaggcctttggcaaagactgttcgatttaatgtgttgaaggtcgttcctgcgggatcaactggtggaggcaagaaggcttttactgtagtttaagttgctttaaaatgttgtggttcaaaggttatccgaacattatagatgtggattttgatttggcggctagtattatgtaatcgttttgtttcgacactggtttagtacaccagtgttttggttctcagttctgattttatcgaagatattttattttggtcggatttc

SEQ ID NO: 1863 - DNA, 387 bp, Lilium asiatic
  Clone ID: LIB3229-035-P1-K1-F7
gttttaatatctgcattcattggatcgaagatgtccgccgtcgcgtccttctcagccgccgtccgtccgccggtccagagaagtcgtagggcggcggccgtgggagtccgatgttcgctggcagctgctccgattctggatcacctccgaatgacgtgcgctacgccgctctcgttgctccgccgcttggcagacaacatggcgtcggacatgcgggctggccttgccgccgatagccgcagcgatctcaagatgattctcagctacgtcgattcccttcccaccgggaatgagatgggtatgttctatgcattggatctcggcggcacaaatttccgggtgctgagagtacatttgggagggaaggatcgtcgtgtcgtagatact

SEQ ID NO: 1864 - DNA, 249 bp, Lilium asiatic
  Clone ID: LIB3229-035-P1-K1-F8
cccacgcgtccgggagaagttgaaggatgaaccaccgacgccaatgaagtacggtggatgtcactagtctcatatcaatattgtgtgggtgtgattttataaatgtggtatgtgggtttagtagcattcccacttgtagccgtctccaaagcggagagagagcgccaatttatgtctgaatggtttgtgtagtcttccgagaaataaggaggaaaagtgtgttattggaatatatgaataatatatgag

SEQ ID NO: 1865 - DNA, 384 bp, Lilium asiatic
  Clone ID: LIB3229-035-P1-K1-F9
cccacgcgtccgcccacgcgtccgtggggagcctctaagcttgttccagttggctatggaatcaagaaattgcaaattatgatgactattgtggatgaccttgtgtctgttgatactgtcattgaggagcgtctaactgtggaaccaataaatgagtatgtccagagctgtgacattgtcgccttcaacaaaatctagactttgctgagagggggaaatgctgtttgcagttgagtgggagacttttctgcaaaatgctaccagtgtgttttagtttatcttctataagagcgtagacttgcaaaatgtttggattttgatggaaggattttgtttttgagacttgctgagtctggtattttagcactttcaaattattatgga

SEQ ID NO: 1866 - DNA, 261 bp, Lilium asiatic
  unsure (1)..(261): unsure at all n locations
  Clone ID: LIB3229-035-P1-K1-G1
tcgacaggggctaacttgctggcatgntcaccaggccgaggccattcacctcaatcatgtagaactcggaattgagctacaattcatgaaatttcctgagttacaacatgtcccctatatttgttcaataatgaagttttatttataaactatacaatgtggttttatgctgaatctgtaaaattcgtactacatattaagtgtaacttttgaagtaattaacaatttgattcggagatttaagagatgttcttcggttgc

SEQ ID NO: 1867 - DNA, 381 bp, Lilium asiatic
  Clone ID: LIB3229-035-P1-K1-G10
atcgctcggtacccttcaggacgccataaattcctatctggtgaaggaaacatccatggaagaagtggtatgtatgtattacactatagagatgcttgacatgttggaagttctgcatgatgctggtattattcatggtgatttcaagcctgataatctacttgttcggtgtgcaagggatgagctgacagaggatggattcagggacagaactggaccttggcgtgatcagggtctgtgcttggtggactggggaaagggggtcgacctaaacctctttcctaccaatacggaattttatggcgattgcggaacatccggcttccgttgtattgagatgcaagaaaattgaccctgggagatatcagactgactcctacg

SEQ ID NO: 1868 - DNA, 324 bp, Lilium asiatic
  Clone ID: LIB3229-035-P1-K1-G2
ttgaaccataggtgtttttgtagcacctgtggtgaaaccaaaaccttttttccaccaccaattccaattggaccaccaggagccattagatcttgccaggcaagtgcctgccggttaagaatttgatggggtggttcccgatcaagaagaaacttgcgcttttaggctctgaatgatataatataaggtggggcgcgagctctgatatgtgaaagtgatcgaggcgattgaggattaggaggattagaaggaggagaagctggaggtgctgggaaaggtgaaggttgatcttctcaagaagggagaggaggaaccggacggagg

SEQ ID NO: 1869 - DNA, 342 bp, Lilium asiatic
  Clone ID: LIB3229-035-P1-K1-G4
agaaaatgaaaattggtggaccgtcgaaacgtgtgggagagatgttagaggagctaaagaagcaaagcccggtggatattcatatgagtgatttgcggaatgctctctcgactctcatgagcgaagggcttgtctcttttcatggcgatgttgttaagcggatttgaaagtgcccgagctatattatgctgcgatcctttgggttaagttaaaattaatctaaaggttggagtgctaagtgcatgtgggtgagaattgaactatgggatgcttttctcaggttttatgtattttgttatgtttgagaatagtaatttttgagctatggttggattcaggatt

SEQ ID NO: 1870 - DNA, 403 bp, Lilium asiatic
  Clone ID: LIB3229-035-P1-K1-G5
ctcaatccccaattccctctgaaatccctttgatggcgccgaaatccgagaagatgcccgcggagaagaagccggtggcggataagcccgccgccgaggaggagaagaagtcagtcccggcaccagcagcggcggagaagaagcccaaggctgggaagaagctcccggcctccaagggcatggagggggagaaaaagaagaagaggtcgaagaagtctgtggagacctacaagatctacatattcaaggtcttaaagcaggtccaccccgacatcgggatctccagcaaggccatggggatcatgaacagcttcatcaacgacctcttcgagaagatggctcaagagtctgctcgtctcgcccgctacaacaagaagaataccatcacctctcgggagatcca

SEQ ID NO: 1871 - DNA, 346 bp, Lilium asiatic
  Clone ID: LIB3229-035-P1-K1-G7
gcgctcgaacttggataacttgctgggatggtcgacaggcagcaggccatgctacgtcaatcattgtgaactcgtattctgtctacaattcaatacatgggggtcattgcaacctggctcatatgtttgttcagtcatgaaggtgtaactatatacttttaagtgtgtatgaaaagggaaagtatgtggattaagagtcttgatcgaggaactaatttaaagtgaacaacggatccctgctgatatgtaagttcagagtcaaaaacgcaaaaaaaaaaaaatttaatcccgaattttatgataaaaaaatacattaatcccttctgcggtagcataaagacatata

SEQ ID NO: 1872 - DNA, 387 bp, Lilium asiatic
  Clone ID: LIB3229-035-P1-K1-G9
acgtcgctcgcacaagttgaaggctggtgattcttcaccagaggagctagcagctgcaacacaggtccagggcgcattcttgcccattgctcgtgagcagccaccggttgagattgtgaaggtgaccgatgagatgaaggctttcaaggcatatggcaagcttcgtgttgagcgaatgaatcagaagcagattggtgctaggatgaagaaggctgcggaggctgagaaggaagagaagaagtaatttggttctgagtcggtcctttttgtctggaatttatctatttgcctttgggtagtagtttgttgttttgtgtttctgatttgttgctcagactcgaatgcatattttggtgagccttttggatggtttattttgctgactta

SEQ ID NO: 1873 - DNA, 396 bp, Lilium asiatic
  Clone ID: LIB3229-035-P1-K1-H10
cccacgcgtccgcgtacttgttttcaggatcgaattccacaatctacgcaagatccggcggcggcggcggcggtggcggtggaagcagagatggggactcgtgaggtgtacgaggagaagctccgctccggcaacctccaccacgatccgaccatcaaccccggactcggctctcctcgttgcccgcgttgcctctccctcgtcaaccccaaatcggcggacggggagtggaagatcacgtcagtcctgcacgatttcaccatagcggttggttcgggcgccggtgggatgctcggtgcggtccacgggtttaatacagggattccgtttgttcagaagcatgtgaaaggacccaagtggctgggtttgcttattgggcttcctcctctactaatg

SEQ ID NO: 1874 - DNA, 395 bp, Lilium asiatic
  Clone ID: LIB3229-035-P1-K1-H2
tcgcggacgcgtggggccgagctacagctcctactctggacattcattcagtcacagtttgtcttcgtccgaggtgggggtggtgccggacggcggcggcggggtgatgggggacgtgacgaatccgtatggggttggcggcccggtggagaggccgacagtggcggtggcgatggatagggaggcgagggtgatgaggtacagggagaagaggaagaaccgacggtttgagaagactatcaggtatgcgtcgaggaaggcgtatgcggagacaaggccgaggatcaaggggaggtttgcgaagaggacggagattgaggcggaggtggaccggtactatactactgctgttgcggtggcggcgacgtcgttcatggtggacaatgggtatggtg

SEQ ID NO: 1875 - DNA, 302 bp, Lilium asiatic
  Clone ID: LIB3229-035-P1-K1-H6
gttctttatttcgggggtgctctcttggtgcttactggctctctcgtgcctccggggccgttactttgatgaaattagagagctcaaagcaagcccacgctctgcatacattaacatgggataacataacacgatttcggtcctattatgtaaggccttcgtgatcggagttattattaagagggacagtttaggggataggtatttcatagtcagaggtcaaattattggatttatgaaagacgaacaactgcgatagcatttgccatggattgtttcatttatctagaacgaaagttccg

SEQ ID NO: 1876 - DNA, 364 bp, Lilium asiatic
  Clone ID: LIB3229-035-P1-K1-H9
ttgatacatagtgagcagctacagcctcatatattttactttaaacattaagacatgccggggggtgctcaaaaggtgcagtgtgctctacaataaagagatgatgattatagctgtatgttttggatctgaattttctgtcaattaacttttattccaatctatttcttaatgggataacatatatgacccctcgatcaattattacatatacttaactcgtaactttatgtcttatgactacccttggatttattaagtattgtatttcttaaaaaataaaaaaaaaaattggctgactcgcttcttttagtatccaaatcttacttactccctttcatttcctacagtctataatattttt

SEQ ID NO: 1877 - DNA, 431 bp, Lilium asiatic
  Clone ID: LIB3229-036-P1-K1-A1
cggacgcgtgggcggacgcgtgggccaagttctttcgtttgtcgaaggatcctctatggccgctgtagagtcagcccccgccgttacaattgagtctccgcctcttgaggggccagccacagcagatgtctttctggtgaagccggccaaggcgaaggcggcgaaggctcccaaggaaaagaaggtcgtgacgaagaagccggccctacatcctacctatctcgagatgatccgcgaggcgatagcgtccctcaaggagcgaaccgggtcaagccagtacgcgatctcgaagtttgttgaagacaagcacaaggctcacctcccggccaactttaagaagatcctcctcgttcagctacggaaactcaccgctgccggcaaactcaccaagctcaagaactcttacaagatcgctgcaaagcctgttgctt

SEQ ID NO: 1878 - DNA, 427 bp, Lilium asiatic
  Clone ID: LIB3229-036-P1-K1-A11
caattccctcatttcaactcagagagagctgaagagatggagtctggaaagatagccaagggcgctgccggccgcaagggcggcgcaaggaagaagtccgtcccaaaatccatcaaggctggcctccagtttcccgtaggccgcatcggccgctatctcaagaagggccgctatgcaaagcgtgtaggcaccggagctcctgtttaccttgccgccgtgctcgagtaccttgcggctgaggtactgcttatttatatctacttggtttggcctattttttcttgagctgatttgagtgtttgtaggtgttggagctggctggcaatgctgccaaggacaacaagaagtctcggatcatcccgaggcacgtctgcctcgctgtcaggaacgaccaggagcttggtaggctgcttcgctgagtcaccat

SEQ ID NO: 1879 - DNA, 429 bp, Lilium asiatic
  Clone ID: LIB3229-036-P1-K1-A12
ctcattttgcttttgttttagatgtaatcctgtgcttacaactgttccccccttgcaggatctgtatgatggacggcgaggatcgcatgcatgcggagaaggagatcaaggaccagaagatcaagcaccacgatggacggctctgatggatggctctgtagcagaggcgatggatggtcctgatagctggaaggtacaagatgaagtttgatcggatggcgaagaggagggccatgcgagaaggcgctagaagaccgtgtgaagaagactctccattggacgcgcgtatgaggtgcctcgaagcagaagagatgccgggcggaagatcgagcactatgaagaccctgcacctataagagaaggtagagcccgagcgattacttcgtcttccgttcttgattgaaatccccgctcccatacgatacccct

SEQ ID NO: 1880 - DNA, 433 bp, Lilium asiatic
  Clone ID: LIB3229-036-P1-K1-A2
gctttggaagaggtgagggagctgccacactttttgctggggcagtccatgggaggtgccgtcgcccttaaggttcatctgaagcaagcaatggaatgggatggtgtggttcttgttgcgccaatgtgtaaaattgcagaagatgttacaccgccgaaaccaattttgaaagcattacgtctcatgtcatatgttcttcctgaagcaaaattattccctcagaaagatctagcagagctggcattcagagacccccagaaaagaaaactggctgactacaatgtgattgcatacggtgatcaaatgcggctgaggactgctgttgaacttataaaggctacacatgacatcgaatcacaacttgaaaaggtatcttcgccgttgctgattcttcatggagccgcagaccaagtgacggatcctaatgtgagca

SEQ ID NO: 1881 - DNA, 433 bp, Lilium asiatic
  Clone ID: LIB3229-036-P1-K1-A3
cgatccgctccatcgccgccggatctccgcccctctccccatcgtagatcgggaacacaatgtcgtcaatcactcttccaactgcctgtctgctccgaagcagcatcaaatatccagagagcaaaatgcttatgaaggccccttcatccctcacctccttgaggagcatctctaaaccttctcggctgaagtcttcaaatggcttcagggcttctgcaatggctacctacaaggtgaagcttgttgggccagaaggggaggaacatgagtttgaggccccagatgacacatacattctggacgcagctgagcttgcagggttggagctgccatactcttgcagagctggggcttgctcaacctgtgctggtcacatggtgtcaggtgctgttgatcagtcggacggatcattcctcgacgagggacagatggg

SEQ ID NO: 1882 - DNA, 417 bp, Lilium asiatic
  Clone ID: LIB3229-036-P1-K1-A8
caagagtggccaaacaaagatgaagtccgtcttggttgatttccttgtgggcgcaggaatcaagccaacatcaatagttagctacaaccatctggggaacaatgatgggatgaatctctctgcaccacaaaccttccgatccaaggagatctcgaagagcaatgttgtagatgacatggtctctagcaatggtatcctctatgaacctggcgagcatcccgaccatgtcattgtcattaagtatgtgccctatgtcggagatagcaagagggcgatggacgagtacacctcggagatctttatgggaggtaagagcactattgtactgcacaacacctgcgaggactcgctccttgcagcgccaatcatactggacttggtgctgctggcggagctcagcagtaggattcagctcaa

SEQ ID NO: 1883 - DNA, 379 bp, Lilium asiatic
  Clone ID: LIB3229-036-P1-K1-B1
tcaagatcgagagagggagagagacgatcgagatgatctacaggagatggtccttgctgacctcgacggtggtgatctggggcgggatcggctccgccgtcctctcctcgaccttcctctttggtggaaaggagaagttccaggagtatttgatccgcgagggtgagaagctgcggcagcaggacagtgttgatagcttcacagaacttagctaagtctggctagtcgaagtgaaggtgagctgagatgattgcaataattcttctctgaacttttgtcgagactttaatttctggtgatgtagtttgcaaatctgtgttaaaaataccttgttgcgatatggtttctttatgatcatattctacatgaacctataaaa

SEQ ID NO: 1884 - DNA, 333 bp, Lilium asiatic
  Clone ID: LIB3229-036-P1-K1-B10
cggacgcgtgggcggacgcgtgggtggctttcgagcaggagttctcgatggaaattcctgacgagaaggcggataaacttgcatgttgtgctgatgtggtgaaatacatattgtcagagactccgactaaaccctcagaaagctcctaaattgttcgttatggcgaagtatcttaatgctattttcatggtgtttttcttcttctcaggagtcattcttttgtttggagagtattctgattgcactttctatggtgtttccttttctcaggagttatgttgaaagagttgtatatgtatgtaccgaaaatcgggttattttgatccattattt

SEQ ID NO: 1885 - DNA, 173 bp, Lilium asiatic
  Clone ID: LIB3229-036-P1-K1-B11
aaaccatgtctgaagagtagtctcatcttttgttgcatgcaagggaatgtctcatcttttgtccttgtttgagaagaaagatatctggttagactaaattttattgtctttgtttgtcctatgatggtaacatttggtatggtattttgagattttgtttttatttgtatggt

SEQ ID NO: 1886 - DNA, 430 bp, Lilium asiatic
  Clone ID: LIB3229-036-P1-K1-B3
gtcaaatggcatcgggactatttcggctacttgctgcccttggaagggagatggttgtcgcagatacatttgggtcctttgcacaaattgtggttttgattctcggtggatttctcatatcacgggagaaaatcagcagatggtggatatggggttattggtcctctcctttaatgtatgcacagaatgcaattgcagtcaacgagttcctcggacaaagttggcaaaagggtgtcaatacaatgcctaatgagacattgggtgtccaaatcctgaagactaaagggatgtttgctgatcctaactggtattggatcggtgtggctgcgctacttggatatatcttcctgttcaacatcctttttattttttttcttgatcgccttgatccacttgccaaaagttatagagtaacctctgtcaaggattt

SEQ ID NO: 1887 - DNA, 431 bp, Lilium asiatic
  Clone ID: LIB3229-036-P1-K1-B4
atagcccaaaacactacactttcttgacttgagataaagcttggacatgttcactaaactccccatagtacatctagtacaaccaaataccctatatgtgtaagtgatactttcctccctttccatgcttctccaggcaatctcatatccagttgcaccaaagatccacaatttatgaggtatactttagtatttatcgctttttccgaaaactgctttggtaattatgagtggagcctcgtgctcctgacgcgttccaagatagtactatatatacttggtataccaatatgtcagagtctatcgggaagtgtcttttgcctacaaatcatatttgctacataagagcgttcaactttgtactacaatactctccacctttatcagatacaagacattttagcttagcacatgtttcattcttaattata

SEQ ID NO: 1888 - DNA, 366 bp, Lilium asiatic
  Clone ID: LIB3229-036-P1-K1-B5
cccacgcgtccggagaaaagcagaacaggagctgaagcctgcgttgagcttggaagaattgcagaattggtccaaggaaaaactagccccatataagattccgacgatgttgtacttgtgggattctattcctcgaaatgcaatgggaaaggtcaacaaaaaggagctgaaaaggttactgttagaatgatcagttttttgggccatcatcacttctggtagttttaaattggcatgttctgaggttattagttaattaagtgtagtggccaattcttctcttggctggttgtagttgtatcatttgatatttggccaaagatttgtgtagggaccagtaaatttgaattgttttggattggaatc

SEQ ID NO: 1889 - DNA, 318 bp, Lilium asiatic
  Clone ID: LIB3229-036-P1-K1-B7
ccatggtggggtgcgtgatggaactactgtcgtactctgggagtacctcaaaggcaaaaaccagaggtggaagattgttccttactgatcgagctgatggagatgccactggtggtaccttatgtcttccaaatctggtctccagggcactttattattggtctctgagtcttcggaataagttttgcctcatataggtgaatgtgtatgtgtttatgttatgcgactgaatgaatgtttgtgatgggttgtgtgagactgttaaattatgatgtacctcttttgttatatggctgagtgaatgtttgtttgtgatgg

SEQ ID NO: 1890 - DNA, 424 bp, Lilium asiatic
  Clone ID: LIB3229-036-P1-K1-B8
ggagtataaggaggctaaccctgatgccaaggcaggacctgctgttgcaagggagggtggtgagaagtggaaagccatgactgttgaggagaagaaagtgtatgttgataaggctgctgagcttaaggatgagtatgagaaagcaatggagaagtataatgctgagaaagatggtggtgctgaagttgatgaggctgaggtggatgctgaagatggtgataatgctgatcaggatgctaagaatgggaaggtttgtgttctgacttttatttgattgcctgttaatcttttccctgatttgtttattttttgtttgatggttttttaatgttctgtactcaaggaaaatgagcttgatgatactgatgaagagtgaattaactggttgtggaagctcttaggccatgtcatgagatgagatgcc

SEQ ID NO: 1891 - DNA, 118 bp, Lilium asiatic
  unsure (1)..(118): unsure at all n locations
  Clone ID: LIB3229-036-P1-K1-B9
ccggggcgacccacgcgnccgncaacanaaggagccaaacccagacaccaaggcacaaccggaggacgcaaggggggaagacgagaagcggaaagccaacaccaacgagaagaacaaa

SEQ ID NO: 1892 - DNA, 324 bp, Lilium asiatic
  Clone ID: LIB3229-036-P1-K1-C10
gggagctgcatgatgtggctggaagcgaggataagacgatcaggatatatgaggggatgatgcattcgttgctgttcggcgagactgatgacaatgttgatcttgtccggagtgatatcctgtcttggcttaatcagagaacaggtgaagcgcagtctcaagttgagatctcacgttcttgatctccacttctatcttataatcaatctagtgtgtattttaatttcaattgttgaaacagtcggttacattataatttgtgggatactcacatgtatctgttgcaataatagaaagatttaagaacaaatcaaggctaagaag

SEQ ID NO: 1893 - DNA, 230 bp, Lilium asiatic
  Clone ID: LIB3229-036-P1-K1-C11
cgcgtccggggagctgcatgatgtggctggaatcgtgtataagacgatcaggatatatggggggtggatgcattcgttgttggtcctcaagactgatgacaatgttgatcttgtcccaactgatatcctgtcttgtcttaatcagagaacaggtgaagcgcattctcaagttgtgatctcacgttctagatcttcacttttatcttattatcaatctagtgtgtttttta

SEQ ID NO: 1894 - DNA, 388 bp, Lilium asiatic
  Clone ID: LIB3229-036-P1-K1-C12
gtacaattcccctctgtgatccttaactgtaaaagcttctgtttttgcttcgcggacacgaaatccttcacaaattcctgcggccatcttgagaccaagcctaaattttctacttcttatccagctagaattatcagtaaatgtaagctccccaagagtcccaacaccttctttcagggatacttgtaagtccccattcaacagaggccgtttaccttcacgttctttcactacatgactctcaaagtcctcttctgtccagtcatcagcatcctcattgttaaaatcgccctcaaggacaacgatatctagttttgcaaatgactcgggtcctgatgtcaccacatggccagtatttgtatcaagcaacactacatggattgcagct

SEQ ID NO: 1895 - DNA, 429 bp, Lilium asiatic
  Clone ID: LIB3229-036-P1-K1-C3
cccacgcgtccgcggacgcgtgggctggctcagcaatattaaggctcccaagaagaacactgtgtgaaacttgtccagtcctatgaggggtgccagtagagtcatttccattatttcgagcagcatcctcagcacttattccaggttggaccggttgccttgcaaccaaatgcaatgtatgtccatcttcaatatgatatgcggacagaagatgatcatcttgaagaacccttcctctgaaaataagacgttgctgctccacaggcagcccggctgaagttgctatcatttcttttaacgctgataccggcatatctttgttcaccctgaatgtatgcatctgggaatctagggttttaatatttatctcaatagttggctccaaactttcacccatcaattggctcgaacaggtgccctcaacggaag

SEQ ID NO: 1896 - DNA, 428 bp, Lilium asiatic
  Clone ID: LIB3229-036-P1-K1-C6
gtcaaaccagccaattgagaagcttatagatgacccttctcaactatctgaaacttcagcagatcacatgggagaggagaacttgggtgataggcgtgggcgagggcgaggccgtggagcaagggggcgagggcgtggccaataccataatagccggggcaatggaggatctgtaatcggtgctacgactcctggtcatcacactgagcagacaggagttgccaagcagcctcctggccctcgcatgccagatggtaccaggggattcaacgtgggcagagggaagccgcttaattcgggtaccggtaccgcagcttgatgggaccttcggtatggctcgttggtgggttcttggtaggggtcttcttagatgatgtcatattagccgtaaacatgttgatttaatttggagttgtgggattggtagt

SEQ ID NO: 1897 - DNA, 79 bp, Lilium asiatic
  Clone ID: LIB3229-036-P1-K1-C9
tttcgcactagaggatacaagcggggtgaggcgttcaagcgtttttaaaacacaccaatagagacaccaaaatacaatc

SEQ ID NO: 1898 - DNA, 429 bp, Lilium asiatic
  Clone ID: LIB3229-036-P1-K1-D1
gggacttcacgcccaagtgaagcaagttcaggtggacaggggtcgttttcttatcgatctgcttctcttcccgtgagtcagtatacattacagagggagagtgtttttccagagagaccagaccagccagaatgtcaattttatatgaaaacaggagattgcaagttcggtgcgatgtgcaggttccatcatcctagagagagactcattcctgcacccaattgcgtgttgagccccttgggtctacctttacgccctggggagccattgtgcattttctactctcggtacgggatatgcaaatttggcccaaactgcaaatttgaccatcccatggcgactccggtaggatttttcgcatataatctatcaacaggtccttcagcagatgttccggtggttcagcgattatttcgatcttcgtcagga

SEQ ID NO: 1899 - DNA, 423 bp, Lilium asiatic
  Clone ID: LIB3229-036-P1-K1-D12
cggacgcgtgggcgcaaacggtgtttctgataaataattatgatatgacaattgctatattgaaggaagctggagcagaaggtgggaaattgcaagtgcattttgaggacctgctaaagagtaacatagctatatttgtggaagaattgcttttggagcattttggtaatatgataaaattcgtcaagacacgagcatccgaagagacgagttccacaacagaggctccgacggttgctgatgtggaacctttggtgaaggacttcgccggtaggtggaaggctgcgatagagctgatgcacaaggacgttattacatctttcagcaatttcttgtgtggaatggagatccttaaagctgcactgacgcagcttctactctactatacccgactgtcagaatgtgtgaagaggattgcgggcg

SEQ ID NO: 1900 - DNA, 411 bp, Lilium asiatic
  Clone ID: LIB3229-036-P1-K1-D3
agaagacaagacccccaatctcatcgacgatggcgatgaagaaatccgcggcgatcgccgcgatatgggcgccgctcctcctcatcctctcttgcttcctcctccgcccggtcctcgcgcttccggccgggtctggtgatggatacacgattaccggtcggatcaagatcgacggtatttcatcaaaaggatttggctttcctgcaaaactatcaaataccaaagtcattctcaatggtggtcagagggttacgtttccgagagcagatggttatttttcattccacgatgtacctgctgggactcatcttattgaagtagctgcattgggatatttcttttcaccggttcgtgttgatatcagtgctagaaatcctggtaaagtacaggcagcactaacggagaatagga

SEQ ID NO: 1901 - DNA, 381 bp, Lilium asiatic
  unsure (1)..(381): unsure at all n locations
  Clone ID: LIB3229-036-P1-K1-D4
gagcttctcatccgcaagctccccttccagcgtcttgtccgggagattgctcaggacttcaaggccgatctccgcttccagagctcggcggtgtcggcgctgcaggaggcgtcggaggcctacctggtggggctgtttgaggacactaacctctgcgccattcacgcaaagagggtgactatcatgccgaaggatatccagctcgccaggaggatccgcggcgagagggcttgatgttgtgaatggttcgctactcgcgaaaatgttggaaaatggtttctgttgtctttgttctactttggtggattaactagctatcaaacttctgggattgttcaaaattattattctctgtttctgaatttttaacgtttgtnttga

SEQ ID NO: 1902 - DNA, 422 bp, Lilium asiatic
  Clone ID: LIB3229-036-P1-K1-D5
atcccccctccgggctctagctccgccatgtcggcggtggcggaggggaggagctgcggtgaccgccttcaagtccccctcggctgagctatcgacggcggatgaggagtggctgaagaagctgccggagaggaagaagccgctgtattctcacagcctgccgtgcatagaggcctggttgaagagcctagggtttaggcagtctcgcgaggaccgtgctgcctggcttattgagaagcctgactggcatgctcagctttcccttgatgttactgatctctacatcagatacctgaagagcggccccggtaacctggagaaggacgtggagaggagattcagctacgcgttgagtagagaagatattgagaatgcgatacaaggtggaccatgatagcaaagagatgtgaagtgtacaaata

SEQ ID NO: 1903 - DNA, 424 bp, Lilium asiatic
  Clone ID: LIB3229-036-P1-K1-D6
atcccccctccgggctctagctccgccatgtcggcggtggcggaggggaggagctgcggtgaccgccttcaagtccccctcggctgagctatcgacggcggatgaggagtggctgaagaagctgccggagaggaagaagccgctgtattctcacagcctgccgtgcatagaggcctggttgaagagcctagggtttaggcagtctcgcgaggaccgtgctgcctggcttattgagaagcctgactggcatgctcagctttcccttgatgttactgatctctacatcagatacctgaagagcggccccggtaacctggagaaggacgtggagaggagattcagctacgcgttgagtagagaagatattgagaatgcgatacaaggtggaccatgatagcaaagagatgtgaagtgtacaaatatt

SEQ ID NO: 1904 - DNA, 187 bp, Lilium asiatic
  Clone ID: LIB3229-036-P1-K1-D7
aagaaaggcagtgtccaagtatctctaacagatacactagtgactgatgtgtagggtttagttcaccagatgtatatatcaaactttgggtgtataggtcgggtgtcttgtgtatcctgtctatatcagtctctgatggaactcgagatctgccttgaaataatataacttgttgtggatcaataaa

SEQ ID NO: 1905 - DNA, 428 bp, Lilium asiatic
  Clone ID: LIB3229-036-P1-K1-D8
tcaatctcccggacaaattcaaatcctcgtttgatttcttcgatggatatttaaaacctgtgaaggggagaaaaataaactggatgagggctggaattttagaagccgacgccgttgtaactgtgagcccatactatgctaaagagctcgtctctggagaagataaaggtgttgagttggacaaagatataaccatgattggcatcaaagggattgtgaatgggatggatattaatttttggaatccattgacagacaagtatatcactgccaattatgatgcgacaacggtaacggaggcgaagcgtgtcaataaacaagcactacaagcagaagttggcttgcctgtagacccagacattccagtgatagtcttcgtaggaaggctagaggagcagaaaggctcagacattctcgctgcagcaatt

SEQ ID NO: 1906 - DNA, 370 bp, Lilium asiatic
  Clone ID: LIB3229-036-P1-K1-E10
aaggaagagtggcgcaatcttgtactgcgacatccttatcttttgaagaacatgagcctccaataccttaaggacataaccaccacattttcgagctttgtttttcactcccaagtttactattcctgatggcctgatctgaaattcgtcatttatcgatcttcttcaagttcttgggagcattgtatgagatttgaacttttagctgatagataaatgttgcctatgctgtttgtctgtaattatttctgtggtgtgtgaacctgctgaattcaccaaatttatcattttattatactttggtgttgagatttctggatgtattaaatacggtattataattttttacttaaaaatttatttttattgt

SEQ ID NO: 1907 - DNA, 423 bp, Lilium asiatic
  Clone ID: LIB3229-036-P1-K1-E12
cggacgcgtgggcggacgcgtgggtgctgggattggccaagatcgtcaatctgctttcaaaatatgtggcaattgttcgttattctgctttcaagatgtggctatcgtttcttctcatgttataaaagatcctttataaagagattcttggaggtaaaatggctttccttcaagcatgaaggtgagattgttgtatcagttagctttgaactattgggtttggacaggatcatcactcttatttcaaaatctgtggcaatcggacaatgtgtttttcctcaacttccatttgacatctacgtatcactccaatgacatctacggctcaccccaagtgagagctggggccgaatgaggtctgccttgttgtcccagattatgtggctatctgaaagtatcagtttcttccaatatatgagggtc

SEQ ID NO: 1908 - DNA, 427 bp, Lilium asiatic
  Clone ID: LIB3229-036-P1-K1-E2
tggatacatacaagtacaaatctgcccataacaagatctcctcacctttatttcctgttctggtatgctggtgcctcggctatatcgttgcaaccctcttcttcgcagtggttgagatggccatcgacactatcatcctctctttctgccaagatgcagaggagcatcacgggactgcgcagtatgcacctccacttctcatggagacgctcgatggccaaggagagatgcagagactcactcaaggatcttgagcaggtgtaggagttctatttcaacctgcccaagggcgagcaatttgtaaaccattcacctgactgctcagcgatccctcaacaagcttcgtataattcatcgaaggtttttgcatcatcaacagaggtttttgcaagcatcggtttactgagactagaaaatctctctttag

SEQ ID NO: 1909 - DNA, 354 bp, Lilium asiatic
  Clone ID: LIB3229-036-P1-K1-E3
atcaattcaaatataggcccattggatccttaaaatataatgatacttcaaactatcttttcttttatcgattatacatcatgattcaagataatatacaagttaaacataacgtcaattgttgatactaaaaaaataattaagaagaagattaaataaaatagaaaatcataaaagggaggaaagataaaaattgaagagatagttcttgaaatataccttaaatagtcagtgatctaataaagtttcaccttattcacatagatttgtagtagggatgacgaaggaaatgagcataattttatagcacaaaaagacataccttgatcaaaattaatgaatattatactcctc

SEQ ID NO: 1910 - DNA, 246 bp, Lilium asiatic
  Clone ID: LIB3229-036-P1-K1-E7
gcgaaccatggttgactatgtacttctgcccggtttggccacccgctgtaggagaatgagaacttcccacggccgcaaccatgtacttccgcctggtttggccaccactgcaggagaacgagaactgcccacagccgcaaccggatcctgtatcatttactaatttgcattatgtgctaattttatatgcaaatttttagactgtgtctgaagagatctaaaaattatttttttctgcttctcgtg

SEQ ID NO: 1911 - DNA, 273 bp, Lilium asiatic
  Clone ID: LIB3229-036-P1-K1-E8
gaaagagtttgaggcggagctgaagaaggatcccgaggaagtgagtaacccgagtgcaaagcctgctactagtgaagaagagaaaaaagatcagaaaaaagaaatcgaggcatcgggcacgaaggagagcatatgaagcggaatgcaggttcatcaatcccctagcgtgtattgtataattattgtatttgtaggatgtctgttgttttattttcttgttccacggatctatagcagtttatgattgctgggacacattgtttgctgtttgtc

SEQ ID NO: 1912 - DNA, 381 bp, Lilium asiatic
  Clone ID: LIB3229-036-P1-K1-E9
gagcttctcatccgcaagctccccttccagcgtcttgtccgggagattgctcaggacttcaaggccgatctccgcttccagagctcggcggtgtcggcgctgcaggaggcgtcggaggcctacctggtggggctgtttgaggacactaacctctgcgccattcacgcaaagagggtgactatcatgccgaaggatatccagctcgccaggaggatccgcggcgagagggcttgatgttgtgaatggttcgctactcgcgaaaatgttggaaaatggtttctgttgtctttgttctactttggtggattaactagctatcaaacttctgggattgttcaaaattattattctctgtttctgaatttttaacgtttgttttga

SEQ ID NO: 1913 - DNA, 290 bp, Lilium asiatic
  Clone ID: LIB3229-036-P1-K1-F1
ggactctatcacttcaatctgggctagccttatttttgtgaagatcaaagagatgatatatataggttgctgcaccgaacttgaaaatagacccctagtgataggaatacaatattagatagaaatgtgagtttactcagtacttacccaaaggcatttgtttgttgtatgtatatccagcctcacatgccgttcaaaaaaacaataagcttctcagaaagaatatttttggtgagctgtgcttgatttgtgtattaaattgaacatattttaaaaagttaatttcaacc

SEQ ID NO: 1914 - DNA, 386 bp, Lilium asiatic
  Clone ID: LIB3229-036-P1-K1-F10
aaggaagagtggcgcagtcttgtactgcgacatccttctcttttgaagaacatgaccctccaatacctcaaggacataaccaccacatttccgagcttcgtttttcactcccaagtcgacgattcctgagggcctgatctgaaattcgtcatttatcgatcttcttcaagttcttgggagcatcgcaagagatttgaacttttagttgatagataaatgttgcctctgctgtttgtctgtaattatttctgtggagtgtgaacctgctgaattcaccaaatttatcattttattatacttggtgttgagtttctggatgtataaaaacgggatattactttttacttaaatatttattttattgaaggatatattgaacagaaaaa

SEQ ID NO: 1915 - DNA, 191 bp, Lilium asiatic
  Clone ID: LIB3229-036-P1-K1-F12
gccttattagaaatttgcattggaggcaacctgtagttctgtaatatcgtctgagtatttagctctatctgctacttgaagaccataaatggttatggagttttcaaactgttgtactgcaatgcttatggcataagaactttgttgacttatttccctctatttaagaagttggcaacatttgctctcgt

SEQ ID NO: 1916 - DNA, 362 bp, Lilium asiatic
  Clone ID: LIB3229-036-P1-K1-F2
ctcgtttgttcgcgtggagaaggcgcagtatcaggtggtggccggcaccaattacttcctcagcctcgccgccaacgacggccagggcaaggaggggaagttcgatgcgcaggtgtttgtgccgctggggtccagcccggccaagctgatctccttcaccccctcgaaatcgggacagtaggggaccggtctcgggccgagttatggatcggtttgtgcggtatcatgataaataatcagccgagttatagatcggtttgtgcggtattatgataaataatcagtgcctttgtctgttaagaaaggtgtgtttaatttatgtattaaattatgacgatgaattgatggtatttggagttctc

SEQ ID NO: 1917 - DNA, 419 bp, Lilium asiatic
  Clone ID: LIB3229-036-P1-K1-F3
ctcctccctccgatggtgggtcgccagtatggaagctcgacagctgcgagcccaacggccaacgatatgtgacactaaacgggtctccacataacgagatcaacatggacaactggttcaaaattgaaaaagcaggttctttgggctacaaactgctatactgccccagcgtagccggcgtccctgccgatggtacttgcggtaatctgggtatatacttcgagaatgggaacaggtggttggttctgagcgaccagccctttttcgttgtctttgtcaaaacacaaacccttcacggatatcctcggccgtacctggattcccatgaaataagggttttatggccgagtgcctgttatgtgtttcggtacgaggagtgtcatcaaaataagggctttacgtctgactagggctttatg

SEQ ID NO: 1918 - DNA, 423 bp, Lilium asiatic
  Clone ID: LIB3229-036-P1-K1-F6
tgagaatagatggagagaaccagatacctctgcatcaaccaatggcgggcttaattatcatgctaattcaatattgaaggacgaaggaagttcacatggaaaagtacacaaggaagaagaggtgggtgaattgaatggttcgagtgacaacaagaattttggagatgatcttcttgacagaagagatgaagaggccaaaagagattaagaatactaaccggttctttacaagtggtagggggagcatccataatcggggacgtcccaattccgagagcgtggcttatccattaaacttaacaaagatcagccactcatacatgtgtattgggttatccattgaactcaaaaaatagcagctcatacaagtacccgcaaccatacccgcagggtcctgttccccaatagttgagataatatagc

SEQ ID NO: 1919 - DNA, 429 bp, Lilium asiatic
  Clone ID: LIB3229-036-P1-K1-F9
cccacgcgtccgcccacgcgtccgcggacgcgtgggtttgacaccaaggggcgtttccgtctccactctatcaaggatgaagagggaaagttcaagctctgtaaggttagatctgtgcagtttgggcagaaaggcatcccctacctcaacacctatgatggtcgaaccatccgctaccccgaccccctcatcaaagctaatgacactatcaagcttgatttggagaccaacaagattgtcgacttcatcaagtttgatgttggtaatgtggtgatggttactggtgggaggaacactggacgtgtcggcatgatcaagaacagggagaagcataagggcagctttgagaccattcatgtccaagatgctactggccacgagtttgctactcgtcttggtaatgtctttaccattggcaagggaactaaa

SEQ ID NO: 1920 - DNA, 401 bp, Lilium asiatic
  Clone ID: LIB3229-036-P1-K1-G1
ctggaggtggatatttggtcatatggttgccttctgtcagaattgctgactcttcagtatccttacatgccacactctgacgcagaagtgtattatctccttcagatgaagcagcgcccgaggctcacccctgaattggaggcgcttagatccgagactggcgtcggaaccgatattatttcagtcctggtaaacctgtgttatgagtgtaccgaaggaaagcctgctgatcgaccgacggccaaatgtatctatgataaattatgtgcggtttcagcacaaacagagtcgagtcaggttagccgaagtagcgagtaacttaatgtggttcgaccactaaaattttgtaggcttgttatcagctgagttatatgaggtgctagtctatagttaacattatt

SEQ ID NO: 1921 - DNA, 428 bp, Lilium asiatic
  Clone ID: LIB3229-036-P1-K1-G12
cggacgcgtgggtcaaaagccaagttagcccctgatcaatggactgtgctcccacttccggcaaagattgttgcaatattatcggacacattagttgaaattcaggagcaagttttggatgaaaatgatgaggatagtgattgggaagaggtttcgcaaggtgacagcgacattcctcaagaggttatatattcagcgaaggttccttccaatgctcgcccttcagtcgaacatcttgatgctttggcaaaagtatttaacgagaccgaggatgttgatgatgatgaagatcttatgaaatctgatccactcaatgagatcaagttggcagagtttctgaggaacttctttgtagatctatcaaatagtgacaaacaactcttcgattatctttgtcagggtttaacaagcgttcagaggagggcggt

SEQ ID NO: 1922 - DNA, 372 bp, Lilium asiatic
  Clone ID: LIB3229-036-P1-K1-G2
aaaatcttcactttgttgagtcaccagcccttgccccacctgaggttcagattgaccttgtggcacaacaacagcatgaggcggagttacaaagggctatgttgcaaccccttccggatgatgatgatgatctcattgagtaggtgtgaaacttcttggtctggagagatggttaacctttgctgagttgtgggagagatgatctgacttttggtggttggatcttttctagtatattttgtagcgctgcatttaggagttatttggtggtactcttgtgtgttggaaaacctagttctggtttatgtgtctggtcctgttttctattatatgctgttggatttgtcataaaagatattgttagagaatttt

SEQ ID NO: 1923 - DNA, 387 bp, Lilium asiatic
  Clone ID: LIB3229-036-P1-K1-G6
gtttaaaggttgtaggtaaccctttttttttttttttttttgaaagccagaacttctgtaatgtttcatttcaccaaaattcacaagaaatagttgaatttatctctagacaattctttcatttatagtagcaaagtccaatgacaaacataatcacaaaaaagggttacctctcctctagtcgcatcatgcctgcccgaaattctttttcctgcatggggattgccccagaatagtcgggacttttttgattgggtcatcagtgatcctcgcaggatttttgtccagttttccatttatataacacctatctagtgggaagggtttccctttgtagtgttatagtattgtttgttgaatgttggaggtaccaatgagtttttgttt

SEQ ID NO: 1924 - DNA, 420 bp, Lilium asiatic
  Clone ID: LIB3229-036-P1-K1-G7
ctggtggtgagaagatttacaatgtgttcgataatcaacttccggcagctttaaaaaggctccagtttgacaaacagctttcaatggaaaatgtaagaaagttaattactgaagctgatggataccagcctcacttgattgctcctgagcaaggataccgccgacttattgaatcggccttggttagtattagaggccctgctgaggcaactgttgatatggttcactcaatattgaaagaactcatacacaaggccgctaatgagactgcagagctgaggcaatatcctactctcagagttgaggtgggaaacgcagcttttgattcattggagagaatgagagatgaaagcaagaaggctactcttcagctagtagacatggaatgttgctatctgactgttgatttcttccggaaac

SEQ ID NO: 1925 - DNA, 306 bp, Lilium asiatic
  Clone ID: LIB3229-036-P1-K1-G8
ccaagccgtgcttatcctgaaagtgtccagagtgttccaggtggcaggttgaatgtgccaagtgtgcctgtttcctccctttactcctttgcaggtgcagctcctgcatatcgctgatgatttttcccaagcacatctgtgggaacaacttttcgtttaaatgttttggtggtttttgtaacctgctgttgttggatgttgagacttgtggacaaatgcggtttactgcttatttttattccccttgtctgacttttagaacattatgttgtaaggtagatcatctctgtttgaattgtctttaaa

SEQ ID NO: 1926 - DNA, 203 bp, Lilium asiatic
  Clone ID: LIB3229-036-P1-K1-H1
ccgcgatgctgtgacctacaccgagcatcccgccgcaagacggtgacggcgattgatgttgtgtatgctcttaagcgccaggggcgaactctgtacggcttcggcggctgaagggatgaggtctgctctacgactaggactcctggtttggctaaattgatgttggggggtcacaggcgtatggacgtcggctaccgttatag

SEQ ID NO: 1927 - DNA, 430 bp, Lilium asiatic
  Clone ID: LIB3229-036-P1-K1-H12
gttccgtcgccaatggagcttcaaaaaaggaaattggccgtgcaaaagaatttattgtaaagcagcttgaagttgaggccggtcaggcaatcgagatgggtactatccatgctggagacttcttgagacgtttttgttcacatcttggtatgacaaatcaagctgtaaaagctgctcaagaagcagttcagaagtctgaagagcttgatgtgaggaggagccccatctcgattgcagctgctgtgatctatatgataattcagctatcagacgaaaagaaaccattgcgcgatatatctcatgccactggagttgctgaaggcaccataaagaactcatacaaggatttgtatccctatgctgcaaggctcatacctacctccttcgccaaggaggaagatctcaagaacctttgcaacccataagtgtg

SEQ ID NO: 1928 - DNA, 345 bp, Lilium asiatic
  Clone ID: LIB3229-036-P1-K1-H2
cccacacgtgcgtagatcgcgagccgtcgctctagaggatccgagctcacgcacgcgtgcatgcaacaatatagctcttctatagcggcacctaaaaccagtacactggccgtatattcacaacggctctactatcctaaccctggccttgcccacattgatcgccgtgagtcacatcctatttacatcggctactgtgatagcgagtaggacgatacagagcgcacactccaacagtgacgcgactctgaataacataatgaaacccgccttagaacggcacattaagcgcggcggggcggtcgttctagaggatccaagcacttgtacgcgcccttgcgccgg

SEQ ID NO: 1929 - DNA, 261 bp, Lilium asiatic
  Clone ID: LIB3229-036-P1-K1-H3
ggcggaagctatggtggcggcggccgtggcggtggcggtggcggcggcggatcctgctacaactgtggtgagtctggccactttgccagggaatgcccgaccaacaagtgaggggagatccctatactttgctatcttattttgttgaagctttgctggatggtttgtgttttggatgttaatggtctgtctctatagtctgtcgtttggattatgggctggtgctcggtagtttggtaatggtatttcaacttggttgtg

SEQ ID NO: 1930 - DNA, 432 bp, Lilium asiatic
  Clone ID: LIB3229-036-P1-K1-H4
gctttacaaaagccggaaagcgttctttcttcacccgttagtactctagagttcatgtctgaacttgacaaccagatccctgcagcatttgatccctttgctgatgcaaatgctgacgactccggtgctggttcgaaggagtatgtgcatgtgcgcatacaacagcgcaacggacggaagagcctgaccactgtacaagggttgaagcaagagttcagttacagtaggatcttgatgcgctctttcttcactatgccagcctgaacaaggaaagtagaaacattcttccgctgatcgccttggagctggataacctggcccagttccatggttcttatgagtaacactgtatgggctatttttattctaagttcatgagttacttgtcccttaaaatctaaagcctctgaagcttaaaatggtatttttagg

SEQ ID NO: 1931 - DNA, 429 bp, Lilium asiatic
  Clone ID: LIB3229-036-P1-K1-H5
gttccaattcttgagatgtaggcggttctaagcctctgtttttacagagagaacctacttaagagtccctacattcatatgagattatcggattttctgaggcattttattttattgtaacttctataattttatttaaattcaaaaatcactactctggttaacgtatttttcccttgtggtaagttgatttatctttaggacggataaattggtacccttattatattgagttctaactatgctgttcacttgagaaatcgactttagctgagttgattagtaattttatgttttcgtaagcttggtctcctgtattgcatgagattggtattaaattatagcattctatttgtttttataatattttgtttttagatttttgtccttagtttaggtacggtttgtgttggttttaggttcttatgt

SEQ ID NO: 1932 - DNA, 431 bp, Lilium asiatic
  Clone ID: LIB3229-036-P1-K1-H6
cggacgcgtgggcaaaatgaggaaaggatcaaagctcaagaaggaaaagagatgttgcaagcttgatgaggatgtgctctcagatctataagtacccctcctcctccattggattgggggtaagaggtctcactccggcccgagtgggggagggcacattgttggccgtctttctctcggttttggaggaggcacattgggagagcatctataagtgatttcggagtggagagttcatcatggttcttgtttgtgggtctttgttgagctttgagagagtcatgtaagtggagtttgtaaggtttgagtcttattttatgatgagtttttggttcggatttgtatacattcaaggatggccaaggcctagaatgggatttgagttcttgtgttgatcttccattgtagtttatttaaactttcatcaatga

SEQ ID NO: 1933 - DNA, 423 bp, Lilium asiatic
  Clone ID: LIB3229-036-P1-K1-H9
cttcaagccacacgagttgaagggagctcctatggaaatcttactgaagttgattccagaacacgcgcgaaagcagtgtgccttcctaggcttgtgattggcatggccacctatctgaggcaatgcgtataaattatgcatgttgtgtgaccttttgtatctggggtgtagtatcctttaatgtgaggactgattgtgggctgcttcgagtctcttgagtatctgaaccgattcgactactactgtctgctactgatcatggtgactgctttgagtttcttggatgtctgagccgattcgactgctacattttgctactgattatggtgactgttttgtcatttgggtatcttaactgatgctactgctgctgtttgcttccgattgtggtgattgctttgtctcttggtatctgaacagatt

SEQ ID NO: 1934 - DNA, 270 bp, Lilium asiatic
  Clone ID: LIB3229-037-P1-K1-A1
cccacgcgtccggtcggcgctgcaggaggcgtcggaggcctacttggtggggctgttcgaggataccaacctctgcgcgattcacgcaaagagggtgactatcatgccgaaggacatccagctggccaggaggatccgtggcgagagggcttgaccatgtctttcttgttgtttgtttgcaacttgctgtgatgacgttgctttttaagtttggggttattagttagctcctggcgaaaatgttgaatttggaaattgctggtttcacaa

SEQ ID NO: 1935 - DNA, 251 bp, Lilium asiatic
  Clone ID: LIB3229-037-P1-K1-A10
gcacgcgtccgtagtaaactaccatatttttgaaaggtagcagctaatgagtgggagattatatgaattttaattactccctattatatttaactgccatcttaattaattagtgtatttttgcataataactgaagtgcatgaatcatattgcaaatatataaaattatatttgttatcaatttatatgacaatcatatgctaaaggctaaatgatgttaatgaatgaatgataaaaattaatgcttatt

SEQ ID NO: 1936 - DNA, 401 bp, Lilium asiatic
  Clone ID: LIB3229-037-P1-K1-A11
cccacgcgtccgcgaagaaaaaaagcaaacctcaaagtgatacctctgagatacctagacatgtggttataacttttgtcaagctactagagaaagcagatcagtacttcgagttaaaggattatcttagaggacgggatgacgtccaacgtcacctctgcgtaccagatgaatcaattaatggggtagttgaggagggaaaagctgatgaaagattcaagatgcttgatgaagaagatattctgcatgctgcagatacgctcaaccgggaattggtaaatacatattttagtgaaatagcacccacgtacatcagaaatcagaagactaatagcactgcagaaatatcggcaaaagaaatggaaaaacggatatgtgaagagttttcatttttgatgctc

SEQ ID NO: 1937 - DNA, 335 bp, Lilium asiatic
  Clone ID: LIB3229-037-P1-K1-A2
agtccagctgatatttaagtatttaaactatgtagaattcttgatactgttctgcgttgtaactggttatgttatggtgagtagactttaatgccctgtgtgacattattagaaaaaaaaaaaaaaaaaaaaaaaaaaaaaaaaaaaaaaaaaaaaaaaaaaaaatgtataaaataaaaaaaaaaaaaaaaaaaacagaaaaaaaaggtgaaagcaaaaataaggtgtaaataaaatagaaagcaccaataaatgtacgaatgtactaaaataggaagaaaaaaaaagaaacttgaaaagttttggggttcacaaaatagaggacacaaattaac

SEQ ID NO: 1938 - DNA, 395 bp, Lilium asiatic
  Clone ID: LIB3229-037-P1-K1-A5
ctcagctgggaatgggactgcaatcgctgctgataagctggaggagcagaagaagagtgcacggagggttcggacgcgggcgatgccgccgtcgccgacggcactgccgttccccacgccgcgttcacaaggaacctccagacaacaggacttctattcccgttgcagcttgaataatcctgcccctcaatctcgtgatactcctcctaaaagagacactggtattgctagtgagaaggactggggtataaacttgtcggagaagaatgttagcgaatctggcgcaaatgaagatggtagtacatggtaccgggaaagtggggaagaccttggtgaaaatggatacaggtgtcgttggaccagaatgggcggacaatctcatgatggtacttcag

SEQ ID NO: 1939 - DNA, 384 bp, Lilium asiatic
  Clone ID: LIB3229-037-P1-K1-A8
tgatattggaacttgtaacaattatagaggcattaaattgttgagtcacacaatgaaattgtgggagagtggttgaacgttgtttgagagttgaaacaatttcagagaatcaatttgaattcatgctgggaagatcggaaatataagctctctacttattgaagagactaatggaaaggtatagagaagaaatatattcatatatggtttttattaatctagagaaagcctatgatagggtgtctagagatagggttgaaaacaccctctttaaatcaggaaggactcaccaccaaagaaaaacaaggaaaataggaaaatacacagatacaggtaatcgactatttagccgatgtgatgttaaggagtgacgcccaccgttcc

SEQ ID NO: 1940 - DNA, 337 bp, Lilium asiatic
  Clone ID: LIB3229-037-P1-K1-A9
cttggaggacatttttgatgatgtagacttctgctgtaagctggccaaggaggagtcggttataattcttccaggaagtgtggtgggtttgaagaattggctccgcattacgtttgccatagacccatcttctctcgaagatgggcttgttaggctaaaatccttctgcgagaggcacaagaagcatgccaaataatgcagacatgctgaacttggtttaaaaagaaaaagaatgatgcaaccccgcgttgtatctctcaattgcctgctcaagttagtagaattgtgcgttctaccatattcgtataatttggatgcttcagacgagtcatatata

SEQ ID NO: 1941 - DNA, 307 bp, Lilium asiatic
  unsure (1)..(307): unsure at all n locations
  Clone ID: LIB3229-037-P1-K1-B1
gaccattcccgattgacccacgcgccccgccacccgttcgaggacatctgtaatgatcttcactatccctactacctggccatggaggaggctaccataatttttgcaagacacgcaaagagtttgaatattatgctccacgttacccatgtcataaacccatattctctcgagaagggcctgacaatgcttaaatgcttgttcgagaggcacaagatgcgtgccaaataatagagacattctgaacttttttttaaatgaaaaagaaaaatgctaacccnggatgtatctctcccttccctgctca

SEQ ID NO: 1942 - DNA, 361 bp, Lilium asiatic
  Clone ID: LIB3229-037-P1-K1-B10
gacttactgcatcaaacaatatgaagagaatggcagcgtatctgattccatgcttgtaaatactgtactgatgcttgtgtatatcactaagttcttttggtgggaagctggctattggtgcacaatggatattgctcatgatcgagctggattctacatatgctggggatgcttggtatgggtgccatcggtatacacttctcccggaatgtaccttgtcaaccaccctgtcaacctcggtaccccgcttgcactttctatactcgcagctggacttctctgcatatacatcaattacgactgcgatcgccaacgccaagaatttcgcaaaaccaacggaaagtgcacgatttgggggaga

SEQ ID NO: 1943 - DNA, 264 bp, Lilium asiatic
  Clone ID: LIB3229-037-P1-K1-B11
ctggtgtgctggccggttacgacaagctgcagctgattgtttttgggaagaagtatggttctggtggtgcataaggtagtccttagatggtgatgaaaaagtaagaactctttattcaggatctcttttggtttagctttcgagattccaataactgttttgtgggagattctctcatttttttttctgctgcggagcattgtctccaaaaccttttattatcctagtagctgtttgttgcggcccaatagcactatatatact

SEQ ID NO: 1944 - DNA, 57 bp, Lilium asiatic
  Clone ID: LIB3229-037-P1-K1-B12
cgtagaaagcatgcttgactcggcttctacttcttttctcctttaaaaaataaggga

SEQ ID NO: 1945 - DNA, 405 bp, Lilium asiatic
  Clone ID: LIB3229-037-P1-K1-B2
cactggggctttggaagctgcttacaaacaggcaactgggaagtctgtttcgctgtctgagcagcagctggtagactgtgcctacgcattcaataactttggatgcaatggtgggttgccgtcccaagccttcgaatacattaaattcaatggtggccttgataccgaagaatcgtacccctacgccggatccaatggcatctgcaatttcaaatccgacagtattggagtcaaggtcaccgactcggttaacataaccctaggagctgaggaggagctaaagcacgcagttgggttagtgcgtccggttagcattgcatttgaggtcgtgaagggcttcaaattatacaagggaggagtttacaccagtgagacttgtggcaagactccactggatgtaaacca

SEQ ID NO: 1946 - DNA, 165 bp, Lilium asiatic
  Clone ID: LIB3229-037-P1-K1-B4
ctttattattggtctctgagtcttcggaataagttttgcctcatataggtgaatgtgtatgtgtttatgttatgcgactgaatgaatgtttgtgatgggttgtgtgagactgttaaattatgatgtacctcttttgttatatggctgagtgaatgtttgtttgtg

SEQ ID NO: 1947 - DNA, 98 bp, Lilium asiatic
  Clone ID: LIB3229-037-P1-K1-B5
gttattaaggggctgctgaagttctggactgtggttaattgcataaaggaggagctgtttgtgggtgtattgtacgaggggttgaaggctactcaacc

SEQ ID NO: 1948 - DNA, 406 bp, Lilium asiatic
  Clone ID: LIB3229-037-P1-K1-B6
gtttgattttgacttcgaaaggaaggtacttgctgaggcagaacaagggacccaaaattggagtagaattgcagtggagaacccaccgccaccaaaaatcactgcatcttcttcttcttcgggtctggtgggggatccagtggtgaacaagtatgttgcttcagggcttggacgggaagccgtgtcgtttgctgttctcaactatggggataatccgataaaggtaagggaatttgtgaaaggctacaaccttctccgtgaaatgggcttctcatcgaaaaacgttgctgaatcactggcaatgtatgataatgacacagataaggctttggcacatttccttaacaactcatcgtgagtctaccatttgtgtttgtgtagtatgcatattcatctcatgacgatt

SEQ ID NO: 1949 - DNA, 403 bp, Lilium asiatic
  Clone ID: LIB3229-037-P1-K1-B8
cccctaaagaaggtgcgcaaagattgtacttattatacaaccccagcaatgaaaattcccgcaacattggaaaatgtgcattcatgtgagaactggctaccaagaagggtgatgagcgcatcgcgcatcacaggaataatacatgctttagagggttggaacacacacgagtgtggagatttgatgttggatgttgagaaaatatggtcttctgcactcaatcatggattcattcccttgactcatatttgatcgactatatctaactaagagagcatatgttgtaatatataaggtatgtcagaatttatgtatgtgtggggttcatttcagaatttaatatgtaaggtgtgagaacatatgtgtgtattcatttcacacggactcgagattatttgtatca

SEQ ID NO: 1950 - DNA, 407 bp, Lilium asiatic
  Clone ID: LIB3229-037-P1-K1-C1
gctgatcatcggggttctcgtgtatctgttctatggacgaaggcacagctcactcactaatgtgatctatgtgtcggtagcgcatgcagatgagatttataggacttcttcggagtatgtggcttaatgttatatccttcatatatcggggaaagatttataatcaagaagttcattttcggacagttcgtgccgggacaaaatagagcatattaccctatatcttctagggaagggatgtaaatagtaatgaaagaaatggtgattctgaaaacatatgttttcagcagttattttcgaaaattattggtgtgatattgtgaaaggcaagaatgcttttaatgacattctgagtaatatgtagtttattgttgaattatatatgtaatatatccaagatggctatt

SEQ ID NO: 1951 - DNA, 258 bp, Lilium asiatic
  Clone ID: LIB3229-037-P1-K1-C10
aattgcagggcgggcactgcgattttgcgtgtgccccatatgaatatcgtacgcgtcgggatgacatacatggtgtaaagctatttatatgttcatatgtttcatgcttctctagtcattccatcgacattccagccaaggtatgtcgattctgatatttgaacaagctagccttttatttagctcgagatgttgtaccttgtttacattgtaggattttataagaagctaagttatctttgtacaatatcttaaatg

SEQ ID NO: 1952 - DNA, 386 bp, Lilium asiatic
  Clone ID: LIB3229-037-P1-K1-C11
aatggcccaacgggctctgctattatgggggtggcccatgtgaatgtagctcccgtggatatgactttcatggcgtaaggttgttgatctgtggataggcatcatgcttgttgagtcatgtcattggcttactgatccaggtttgtgggaactcataggttgtctaggtggcgatggatggagatccggctgtgatatcgtgtgctacaaggcagacaacatgcaaatgcgcccacatatttgtacaatcatcctagatgctatggacagtatggaatgtcttcacaatatggagggacgaggataagtacaatgctcatgctaggaatgtacttattccagcgaagacattttttttattacattggctagttatggcacacgcc

SEQ ID NO: 1953 - DNA, 402 bp, Lilium asiatic
  Clone ID: LIB3229-037-P1-K1-C12
gctgattccacgaagtaccttagtgagtttttgaaggatcgccgtgcacatgatatgacccactcgaatacttcagttcaagaaacagatggacggaaaatgacaaaccatcctgtatatattgttgttttcttgatccatgttcttgctcatgataaaggatttccttctgggactcgtcaaaatgaagaagcatttgctgagttttgcagtccaatcattgttctcctgcgagccctgcttaatccaggttgtattgaaaatactaagaatagtgtgaacgacacagtatcaaatttgcttgctatttttctcgccattaaaaaagctgaggatgctgttgatgctcaaattacttccaaactgcatgttctttccaacattggcttgttcattctaaaa

SEQ ID NO: 1954 - DNA, 322 bp, Lilium asiatic
  Clone ID: LIB3229-037-P1-K1-C2
gttttatgtacaaatgtctggtgtgtgtaactgtacgaggagcgatacgaaataaggaatttatggccgagagaatgctatattatctaggcatgaaaggttttgaaaaaagaccttacttacataatttagtgatatactacacagaatgttcccagaaaaaaaaccaaatttaataataatttaaatttttatttaaattactaaaaaaaaaaaaaaaaaggaaggcgcttttagagaatcaaactaaacgaccccttcattctaaagaatatgttttttatagcgacaaccttaatttaatttactggccagcttttta

SEQ ID NO: 1955 - DNA, 368 bp, Lilium asiatic
  Clone ID: LIB3229-037-P1-K1-C4
cggacgcgtggctaaatgttcaaattttggtctgaggagtgctatgtacgacattgacaatgaaagatctaaactcgcagtggtaattgagctcttacggtaaaggtgaaaggctgttcaacagggaatagatagggagagcttggcactggaccataatgaaagcgagagttttcagctgtaactgctggaggaaataattggtcgacttcaggagatgagggaagcatcagaacctgcagagaatgatacgcaggctatattacccgctccatctactaacgatactataaagaaaaggcggtgccgcagggtgtattggggacaaccgcaaggcagtacatagatgacgctgtaagtaccctcat

SEQ ID NO: 1956 - DNA, 160 bp, Lilium asiatic
  Clone ID: LIB3229-037-P1-K1-C5
aaacgcatgatgctcaatggctgtgcgtataggcggtaatgaaagtccacgtagaacgaatggattagagaggctaggggtgaaagtacacacaatcaacagctaaaattgactattgttcctatacaactcgacactatctatcgagaataatgcataa

SEQ ID NO: 1957 - DNA, 270 bp, Lilium asiatic
  Clone ID: LIB3229-037-P1-K1-C6
gttggcgtgtctggcaatggctgcggcaccggataatgtgaatgctgtggtgaatgtgattgccaatctgcagcagcagaatttgagggtgttgtttgatgttgcaaactctagggttgggtttgctcgcgaggtctgcaactgagctggcgtttgtttgggagtgtggtaataattgttcacgggttgtatttgtgttttgtgtgttcgttttgtatgagaagaagatgagagtgtgtgtttgaaggaaactatgagattttctctgtc

SEQ ID NO: 1958 - DNA, 396 bp, Lilium asiatic
  Clone ID: LIB3229-037-P1-K1-C7
ctgggtcgtacacacaacttgtcttggaaactgctgctattgagatcctttcacttccagtaacagcatcacaaatagtatcttcacttgttcatattgtcgtccatgtacagccaacactaattcaatctagtaatggactccaaggaatgtcaagtggaattggaccaaactccggcttaccgacttctccttcgggtgtaactgttgaatcatcaaacacaaaccgaacttctgcaacaggaatcaatgcaaccaattttgtttcaagaagtggttattcctgccaacaattgtcttgtttgatgatccaagcttgcggacttttgttggcccagcttcctccagaatttcatatgcagctttattctgaagcatcacgtatcataaaagatt

SEQ ID NO: 1959 - DNA, 206 bp, Lilium asiatic
  Clone ID: LIB3229-037-P1-K1-C8
gctttatgtccgagtgtctgttgtgtgtttcggtacgaggagcgtcatgaaataaggactttatgtccgagtgtttgctaatgtatcagtgcatgaagtgttttgaaataagagctttacgtccatttgtgtttgatatgcgaaccagtatatgccgagatgaaaactaatgtttaatagtaatttaatttctaattcaaattctc

SEQ ID NO: 1960 - DNA, 320 bp, Lilium asiatic
  Clone ID: LIB3229-037-P1-K1-C9
ggagaatcctcccttggcgacgatacatgaggatatacgacagctactaggcgagaaatgtgcgtctcttatatgggcagctagccagttcgggtcaaccttggattcagagcagaagcagatcgccttgaatatccaagctagaagggttatagaggcattggagctatactaatcatatgtttatcccatagtattgcttcttttttggctttttactcgacctatggtggaagcatacttgttaccatagttcgatgaaattctggactgcaccattttctgtgaagtggaagtagtatttgtacagagcattatat

SEQ ID NO: 1961 - DNA, 374 bp, Lilium asiatic
  Clone ID: LIB3229-037-P1-K1-D10
ggggaaccaggatgctcggaactctgaactcataaaccactcttgaaactgcttaacctttaggaaagcaaattagaaatatataccaacgctaggcatcttaagtcatcggtatttacaggcactcgtcatacgtacaggcatgattcgtgaacaggtgatctaatgaactcataatctgggccgacttctagagactcaggataacacacagacactgaatggttcggtacagtctcttgcctggatgatccagttctaaaggatttggctgagaaatacaagaagacggtcgcacaggttgttcttcgatggggcatccagaggaacactgttgtcataccaaagtcctcgaagatcaagagggtggaaga

SEQ ID NO: 1962 - DNA, 401 bp, Lilium asiatic
  unsure (1)..(401): unsure at all n locations
  Clone ID: LIB3229-037-P1-K1-D11
aagtccaccggtggcaaggctccccggaagcagctcgcaaccaaggcggcgcggaagtctgctccggccacaggcggcgtgaagaagccccaccgcttccgccccggaactgtggctctccgtgagatccgcaaataccagaagagcactgagcttctcatccgcaagcttcccttccagcgccttgtccgggagattgctcaggacttcaaagccgatctccgattccagagctcggcggtgtcggcgctgcaggaggcgtcggaggcctaccttgttgggttggttgaggacaccaacctgtgcgccattcacgcaaagagggtgactatcatgccaaaggacatncagctcgccaggagaatccgcggcgagagggctngattngnttctaattcgct

SEQ ID NO: 1963 - DNA, 381 bp, Lilium asiatic
  Clone ID: LIB3229-037-P1-K1-D12
gcacggtggcgttgagggagatccgcaagtatcagaagagcacggagctcctgatccgcaagctccccttccagcgcctggtgagggagattgctcaggacttcaaggctgacctccgcttccagagctcggctgtctcagcgcttcaggaggcatcggaggcatacttggttggtctgtttgaggacaccaacctgtgcgccatccatgccaagcgcgtcaccatcatgcccaaagacatccagcttgcccgccgcatccgtggcgagagggcttgaaatgtctctctgttcgctcctcctgtggatggtttctactgtctcgtagaaagttgtaattcggcagtttatgcagtctaattgaagtttgttatctgcccct

SEQ ID NO: 1964 - DNA, 402 bp, Lilium asiatic
  unsure (1)..(402): unsure at all n locations
  Clone ID: LIB3229-037-P1-K1-D2
cccacgcgtccggataaaaacgcacttccaattgacgttgatgagaagaatggtaacccagttgatgagaagaacggtaacccagtcaaaaaagtacctctgaacgaagctgacatgaagagctctgatccggtcgaagccaacaatgatcatggtataagtaagctaaaacaagctgcagttactgcaatctcagctgctgctgtgaaggcaaagcttctggctaaccaggaagaagaacaaatcttggagcttgtctcagtggttgtcgagaatcagttgcggaagttggagataaagttggcgctcttcaatgagatggaaagtgtgatcgcacgggtgagggagcaaattgatcgagcaagacagaaacttctncaagagcgtcaacagatagttgca

SEQ ID NO: 1965 - DNA, 334 bp, Lilium asiatic
  Clone ID: LIB3229-037-P1-K1-D3
acgcgtacgcgtacggataaaaacgcacttccaattgacgttgatgagaaaaatggtaacccaggcgctgtgatgcaccgtcacccattttataaagtaccttttaactaaattgacatggacggcttttataccttcgaagctgcaataaccctggtttaacgtacgctaaaacacgttgaacacactgcaatctcagctgctggtgtaaaagcaaagattcttgctcacctcgacctagaacacattttggcactctgcatagcgaatggggcgcaccctgtagcggagcattaaattctgtgggcgctctttatacgcacagaaagtgtga

SEQ ID NO: 1966 - DNA, 287 bp, Lilium asiatic
  Clone ID: LIB3229-037-P1-K1-D4
gcgtaccctacggtccggaaaaaaccactttaattgacgttgatgagaagaatggtagcccagttatgagaagaacggaacccatcaaaaaatacctatgaacgaagctacatgaatagctttgattcggtcgaagccaacattgatcatggtataagtaagctaaaacaagctgcagttactgcaatctcagatgctgctgtgaaggcaaagttttttgctaaccaggaagaagaacaatttttggagcttgttatagtggttcgtcgtgaatcatttgcggaagt

SEQ ID NO: 1967 - DNA, 107 bp, Lilium asiatic
  Clone ID: LIB3229-037-P1-K1-D5
gtggatcgagagcggacggtctaggggatccaagctgacgtgcgcatgcatgcgacgtgatagatcttctatagagtgacctaaattaaattgattggtcggaggga

SEQ ID NO: 1968 - DNA, 340 bp, Lilium asiatic
  Clone ID: LIB3229-037-P1-K1-D7
acggcacggaggcgtggagggagatcctttgtcttataagagcacgcatgtggcgatagacatgttctatttcaagcgcctggtgaaagagactgctcatgactttacgacttacctatcttgcaaaagctgacttactcaacgataacgaggcatatcatagcatactttctcttgctgggcgaggacacaaaaatgggtgacatatatgccttgcgaataattatgcagacctaatacataaaggtactccccctgatgcggggcattaagcctggaagttgttgtgggtaccctcatcctgaccgttacacttgctatgtcgctaacagccgctcct

SEQ ID NO: 1969 - DNA, 171 bp, Lilium asiatic; identical to SEQ ID NO: 509
  Clone ID: LIB3229-037-P1-K1-E1

SEQ ID NO: 1970 - DNA, 257 bp, Lilium asiatic
  Clone ID: LIB3229-037-P1-K1-E10
aagctccagctatgggaggaggcatgggaggaatggactactgagattgagttaataccagaaatagtaaatttggtacttggtggtatcgcttaacttggatctgaactatcattgttagcaattattttctattctgcaccctatatatatctatgtatttcaggaagtttggtattggattaaacattttggttttatcattggtgcaaactcattttttgggaaggtattagtatgagacttggtgaggaatc

SEQ ID NO: 1971 - DNA, 258 bp, Lilium asiatic
  Clone ID: LIB3229-037-P1-K1-E11
aagctccagctatgggaggaggcatgggaagaatggacctcctgtaatggagttaaggccaaaaatcgtccatttggtacttgagggtttggtttaactcggatctgaactataatggctagcaataattttctattgtccaccctatatatacctatgcattgaaggaggttgggaatgggattagacatttggtttttatcattgtggcaaactcattttttgggaaggtgttaaaatgagactcgttgtggtatc

SEQ ID NO: 1972 - DNA, 62 bp, Lilium asiatic
  Clone ID: LIB3229-037-P1-K1-E12
gtggaattgctgtttttaccagcaattccggagcaccatggaacaaagtggacttctcgttc

SEQ ID NO: 1973 - DNA, 375 bp, Lilium asiatic
  Clone ID: LIB3229-037-P1-K1-E2
taataatcaagcctaagttttgcaataatcgagcctaggtaacagaactggtcactccctccattattggaactgtttactcttagggattgccttatcatcgatctttactacctaatgatcaccggtcctcttgttcttgaagttgcattccatatactcggttttagtcatacagtcgtacttattccgaaacttttagacccaagtgcttccctgtaacgcactagctatggctagtcaaatcatccttgtttagagaaaataagcaaacctgggtctagttctatggtgacaggatactcacttgtttctcccgctggtgatctaatatatgccagagacccatcatacatgtccttctcgcatcaacat

SEQ ID NO: 1974 - DNA, 407 bp, Lilium asiatic
  Clone ID: LIB3229-037-P1-K1-E3
cccacgcgtccgatccctaaccctagatctcaattctccttcgttctttctccatggctcgcaccaagcagaccgcccgcaagtccaccggcggcaaggctcctcgcaagcagctcgccaccaaggcggcgcggaagtcggcgccggccaccggcggcgtgaagaagccccaccgcttccgccccggcacggtggcgctgcgggagatccgcaagtaccagaagagcactgagctcctgatccgcaagctccccttccagcgcctggtgagggagattgctcaggacttcaaggctgacctccgcttccagagctccgctgtctcagcgcttcaggaggcctcggaggcatacttgggtgggactgttcgaggacactaacctgtgcgccatccacgccaagcgcgt

SEQ ID NO: 1975 - DNA, 340 bp, Lilium asiatic
  Clone ID: LIB3229-037-P1-K1-E6
gttccaatctcaatcctcgatggcgcccaaggccgagaagaagcccgccgccaagaagccagcggcgacgccgcccccagaggaggagaaggaggtggtttcgccgccgccgtctgagaagaagccggcggagaagaagcccaaggccggcaagaagctgccggcagccaaggagggcgatgcgaagaagaagaagaaggcgaagaagtccattgcgacctataagatctatatcttcaaggttctcaagcaggtccattccgatatcgggatctccagcaaggcgatgggtatcatgaacagcttcatcaatgacatctttgagaaagctcgccaggag

SEQ ID NO: 1976 - DNA, 371 bp, Lilium asiatic
  Clone ID: LIB3229-037-P1-K1-E7
gtcgaattgaatgggtaagggaaccggccggttcggcatgcgccagaacaagacccacaccctatgcgtccgctgtggccgtcgcagctttcacctccagaagagccgctgctcctctagcgcctatcccgccgctcggatccgcaaatataactggagcgtcaaggccatccgtcagaagacgactggcactggcaggatgcgctacctccagcatagtcgccgtggcttacagagcaacttccgtggaggcactgaaacagcatccaggaagaaggccggcgccgttcgttacttgtaaagagtgagaacttgcgattttctggctcaatttagctcaattgttatcgatcttgctgtgagtgggtttg

SEQ ID NO: 1977 - DNA, 337 bp, Lilium asiatic
  Clone ID: LIB3229-037-P1-K1-E8
ggagtggtgacactcgatggaggcacaccatgtagacaagatagtgagtgcatcggggagggacattctttccatccatatggtaaagtggttagcgccgagaagcggtgactgcaagcagaagacgacttgcagaagacgaacggtagacatctgagcaatgagcgcaaaggtctgtcttgtgctgctgagtaaagtcatgagcaaataggtgagccttgcgtccctccacacatgcgtgacacctgtctgaaagaaagccctaagctcctcgtccatggtttgatgccattctgcactttgaacagacttccggtacaactggggctttctaata

SEQ ID NO: 1978 - DNA, 360 bp, Lilium asiatic
  Clone ID: LIB3229-037-P1-K1-E9
agcagaagtgcaaggcctgcgacaagacggtgtacgtcgtcgaccagctcagcgccgacggcgtcgcctatcacagggcctgcttcaagtgcaaccattgcaagggaaccctaaagctgagtaatttttcctcgctagatggcgtcctttattgcaaacctcatttcgagcagctctttaaggagacaggaagctacagcaagagctttcagtcaccggcaaagacagatgacaagtcgaggtcggaaggctcggaactgacagggtctccagtccctgttgagaagccgacccctgaactgacaggatcttccagcactgttgagaaggcgacttctggacagacggcgttttcaaaca

SEQ ID NO: 1979 - DNA, 400 bp, Lilium asiatic
  Clone ID: LIB3229-037-P1-K1-F1
cggccatttttgttattttcggggacacggctggccacacacatgtgttctgtataggacggacacacaatgtgggctctccgttttacatatactacgcagagagcgcccctctctctggctctaaaacagtgtgtgccccaaatattctgtgtttcacagagcaaaatgagatgctgtcttacgagataacattcaaaacaaaatctcctcaaggccctgtgtttggtgctttgacatggagcagcggagcacattcagtgcgtaacaccatagtgtcgacgtgggcgccggtattgaagatgtttgctagctatgggaggatctttaatcactgaaagagggtgagtatgcttgccaatcaatcaagagaaataactgtgcaactatgtttgttttt

SEQ ID NO: 1980 - DNA, 401 bp, Lilium asiatic
  Clone ID: LIB3229-037-P1-K1-F10
ctttttgacgttccgatcgtccccgtcggatccctactgcatttctgggggccctggagctcaattttgggctgatactcgaagcacatgatctggagccatgaggaagaagttggatacccgatttcccgcttctcgaataaaaaagataatgcaagcagatgaagatgtgggaaagattgcacttgctgttcctgttttagtctctaaagcattggagttgtttctgcaagacctttgtgacagaacctatgatgtcactcttcagagaggtgtaaaaaccatgagctctttgcatttaaagcagtgtgtgcatagttctaatgtctatgatttcctgcgggatatagtgagcaaagtttcggatatggttactacagatggtggcgctgcagatagat

SEQ ID NO: 1981 - DNA, 222 bp, Lilium asiatic
  Clone ID: LIB3229-037-P1-K1-F11
taatttcatataaggggacggagaactatgattgtatcatcttcaaccagtacgctactttgtttcttcttctatacatccctaacgctgatgtctttggttactattatctttacttggttagaatatttaataaaccaagcaaattgataaatggaaatttgcgaaccacataagcattttatctgggtcttttttctctttgtacggggaaaatgtatg

SEQ ID NO: 1982 - DNA, 402 bp, Lilium asiatic
  Clone ID: LIB3229-037-P1-K1-F12
cggacgcgtgggcggacgcgtgggtgagatctagggtttgcggcgcgatctgagagaaggagaggagatggggcattccaacgtgtggaactcgcatccgaagagctacgggcctggatctcgaacctgccgtgtttgtggcaatccgcatgggctgatccgaaagtatggactgatgtgctgcagacagtgcttccgtagcaatgccaaagaaattggttttatcaagtatcgctaagggggtttcaaggctggactctggtttagggaatactatgccatgtaggtctgattgcttagtaacaatgtcatcatttagtgctgctgctattaaagtttggttatgttttcgtttgtactgaggaattgtgtgctttatttgatacttgttaagcttatttt

SEQ ID NO: 1983 - DNA, 397 bp, Lilium asiatic
  unsure (1)..(397): unsure at all n locations
  Clone ID: LIB3229-037-P1-K1-F2
ctcaaatctctcatcaatcatgtcaggccgtggcaagggagggaaggggctcggcaagggcggcgctaagcgccatcgcaaggtgcttcgggacaacatccagggcatcaccaaaccggccatccgccgcctggctcgccgtggtggagtgaagaggatcagtgggctcatctacgaggagacccgaggcgtgctgaagatctttctggagaacgtcatccgcgatgctgtcacctacactgagcacgctcgccgcaagacggtgacggcgatggatgtggtgtatgctctcaagcgccaggggcgcaccctctatggcttntgggggttgatctagntcttctggcctgggtctctgttaggttttggttggatgcaaatttgggtgtcatggtcc

SEQ ID NO: 1984 - DNA, 360 bp, Lilium asiatic
  Clone ID: LIB3229-037-P1-K1-F3
acgctcaaatctctcatcaatcatgtcaggccgcggcaagggagggaaggggctcggcaagggcggcgctaagcgccatcgcaaggtgcttaggcacaacattcagggcatcaccaaaccggccatccgccgcctggctcgccgtggtggagtgaagaggatcagtgggctcatctacgaggagacccgaggcgtgctgaagatctttctggagaacgtcatccgcgatggtgtcacctacacttgagcacgctagacgcaagacggagaccgctattgatgacgtgtatgctctcaagcgccaggggcgcaccctctatgggtatggaggttgatctaattctgctgtactgggagtct

SEQ ID NO: 1985 - DNA, 395 bp, Lilium asiatic
  Clone ID: LIB3229-037-P1-K1-F4
caccaatttcattctaaaaaaataattcttttatacaatgataaagttcccccacatgtcgaaatcctacttttttttgggggaaaatgatgtctgctgttatattgtactgaatcagtgtccttgaatcttaggtagcagctccctttgaactattttttttataaaaaaattagggaccatccttttctggtaatactagtggataatggtgcagtatatgattattgtgaacaagtaattgttatttttaggaactttatgttattttttcgctacacaggttgcaactttgctttcggtatgccgaagtgcttcattatacattttaaaatataactcatgcattgtgtctgctatgaggttattacctcatttatgcctaaacattattt

SEQ ID NO: 1986 - DNA, 406 bp, Lilium asiatic
  Clone ID: LIB3229-037-P1-K1-F5
ccgaatccgaaccccaatcagaaaccctcggcggcggcgagcggccggcgatcaattcacgcagatcgtcgaggctgggacggagatccggtagtggatggtggatctggggggttagatgctgctctgcggatccgtctcatcgtggatctcccagctccttgcctgcatgggagcagaggttgccttggatgctgtactaagcccaccccaattattgcggtggacgagccctcaaaaggtttgaggatccaaggacgtacagtgaaaaagcccagtatatctgaagatttttggagttcaagtacatatgagatggacaatagtgggattcagtctcaaaggagcatctcttccatcagcacttcaacactaaacattgatccacatggagcagcaagtacta

SEQ ID NO: 1987 - DNA, 276 bp, Lilium asiatic
  Clone ID: LIB3229-037-P1-K1-F6
gcaaatgtttggagctcgagggagcaggtgacagacactggaaattttatctaaagggaatggggacccttgattgaatcatgttgaaattttaggctacttttttttttctttttttcatccctaagggtgatgtatttggtaacttttatctttgcttggttggaatttttaataaaccatgcaaatggataaaaggaaattggcgtacaacataggtattttattggggttttttttctgtttttaggggaaaaatgtatggggttataaata

SEQ ID NO: 1988 - DNA, 311 bp, Lilium asiatic
  Clone ID: LIB3229-037-P1-K1-F7
cttcatcaacacacaattcaacttgctcagcctgcaactgtcaaagtcgcggctaatttagttaggttgctggcataccagaacaagagcatgctgcagactggcctaattgttggtggatgggacaagtacgaaggaggtcaaatttactctgtgccccttggtgggacaattttgagtcagccttttacaattggaggttccggttctagttacttgtatggcttctttgatcaagtgtggaaggaagggatgagcaaagatgaggctgagaaattagtggttaaggcggtctctcttgccattgcacg

SEQ ID NO: 1989 - DNA, 245 bp, Lilium asiatic
  Clone ID: LIB3229-037-P1-K1-F9
cgatctcgtggggctgacacatgagccactgaaggttctatagtcgctgataggaactgtaaaacgatacattacattgtaccaaatattttttgttgcggcgctggaactgcgagtgataccgtcgcaaggacagatatgatcaggtcttatgtacagctttaaagatttgcttctggacaagaatgaagggttgttactggccttaaccttacaaagatagatctgttaagctatcaaggaca

SEQ ID NO: 1990 - DNA, 262 bp, Lilium asiatic
  Clone ID: LIB3229-037-P1-K1-G1
atttcttatattactaaaacaaaattacttacttcagcctgaagtgtttgaagggggcgcaaaacacaagcttactgtgcccccaatcattttttgtttccgcccttcgacaacgggagattccgttgccaaggtccctatcaccagctctcatctacagctttacacacttgcttctgctcaccaatcatgggttgttgctttgcttaaccttatgcatatttaagtttgaagctatctacgccatttttgcacgctctta

SEQ ID NO: 1991 - DNA, 356 bp, Lilium asiatic
  Clone ID: LIB3229-037-P1-K1-G12
tttgctcctgccaagggggagtttgaggggtttgagatgtatgctgagaatggtggctgtggctgcaagtgtggtgataactgcaactgcaacccctgcaagtgtggcaagtgatctctccatggagaagaggatgtagggtttgataccctttgtttacttgtttctgctgtagtgctgaataatggccatgggtttatatgatgcaagtctttttgcaccatgagtggttgttcaccagtggcttagtgtcttgtggtggtgctgtgttggctctgtatggtctgttgaaattactgaagtgttgattttagtgttttatctaaatggaatattattgagtaattatcatcttc

SEQ ID NO: 1992 - DNA, 246 bp, Lilium asiatic
  Clone ID: LIB3229-037-P1-K1-G3
caatcgtttgctaggagactcgactagttcaagatgaaattaaacggggaaggagctggaggaaataacgtacccgatctgtctctaagatgtgacaggtattctatcgagtgaactgaatgcaatacattgttggaagtttacaaaattcaagactgagacaaccctggtgtaacccgacaccttattcacttccaacttgtgaaggatgtgtgaccccaagtactgtaagaagcttgtttctgg

SEQ ID NO: 1993 - DNA, 409 bp, Lilium asiatic
  unsure (1)..(409): unsure at all n locations
  Clone ID: LIB3229-037-P1-K1-G4
cttgattaattttgctccctcagctacacagatctagcaaacatggttgtgccggcgttggggatggccgtggctgcgctactctggcctttcaacatctacctcccgactggtcggcagctgccgagggtctgcactgccatctcagagggcttcacgtttctcctgtcgcacctgcagcggattcttgaggacgagcgcagcgaggaggagatggagagttgggagagggtcgtccgggtcgtctgcaatgaactgctcgcctggaggcccctcccgggagccctcatcttctcctactgatctaattatggtggcgctgtctcaaaatggaaagctgnacattatctctctctctttcctcttaatttgtagctcgttttcggaagatgaaacaacatctcaaagg

SEQ ID NO: 1994 - DNA, 264 bp, Lilium asiatic
  Clone ID: LIB3229-037-P1-K1-G5
cccacgcgtccggggctttgcaactctcacttcagccgttcctctccgccgccgtcgccgtcgttcccgatctagcccttacaactatggcggagacgaagcaggccccgatcacgatccgaactcggaagttcatgaccaaccgcctcctctctcgcaagcaatttgtcatcgacgtgttacacccccggagggcgaatgtctcgaaggcggagctgaaggggaagctggcctcgatctatgaggtgaaggacgctaacgcga

SEQ ID NO: 1995 - DNA, 374 bp, Lilium asiatic
  Clone ID: LIB3229-037-P1-K1-G7
atttcttatattattaaaaaaaatttactaacttcagtctgaagtatttcattgataatcatgacacaagctaaatgtgccaacagcaaatgaagtttaagacagccgaaaactggagttctgtttgcaaatgaccttaacatgtgccagcagctacaacactggtttatttattcaggagacttgcaatctagagatgggaagataactggataggtaactcatgcttgatacgactcacactctcgacactggataggtcatttgcaaacagaactccagttttcggctgtcttaaacttcatttgctgttggcacatttagcttgtggcatgattatcaatgaaatacttcagactgaaggtaggaaattt

SEQ ID NO: 1996 - DNA, 404 bp, Lilium asiatic
  Clone ID: LIB3229-037-P1-K1-G8
gaaagaaatacagtctgtttcattgagtttaatgatgtaaatagtgctgtggctgttcatcagaatttgcagggtgcagtccttcctagttctgatcatggtggcatccgaatacaattttcgaagaacccttttggacagaggaaggactcggtcaatggtgctacgcataaagtcaacggagctcttacatatcagcagtagcttgaaggggggagtttgctctctctgttcttaaaatagaaagatgccatgctgttgcatcacacatcccaagacatctagtgcataattgcttgtgtgaatgcacctggtgatcatgagtgccattaacatcatgcatgatgcggaattacattttgctgttacttaagagtggattagcattctcaccatggatactt

SEQ ID NO: 1997 - DNA, 310 bp, Lilium asiatic
  Clone ID: LIB3229-037-P1-K1-G9
ctggatgcaaacattgactcgttcaagttgaagttcacggagaaagagctgaaagaaattacagacgcaatctctctcgaagatgtggcaggtaatcgaaccaatgaaatgatagacacacatatttggaagtatgctaatactccactacctagccgtgcctagtgtaacttgcaccttattcacttccaacttgtgaaggatgtgtgaccccaagtactgttagaagcttgtttctcgttatatgtttgacagtttgtatatggatactttgatagagttgctctatgcttgttttttccagataaaa

SEQ ID NO: 1998 - DNA, 303 bp, Lilium asiatic
  Clone ID: LIB3229-037-P1-K1-H1
cggactcgtgggctaggagacccctggggtgctgaaaatctttctggagaatgtggatttgcatgccctgacctacaccgagcacgcccggcgcaagacggtgaccgcgatggatgtggcgtatgcacttaaaaggcaggggaggacgctctaccgcttccgagggtgatgggtttggtcttgactattttcttttgttggtggatggttatcctaggcggacttttgttttgttttgtgtataaatattacagatttcttatggaatataaaagggggttggagaaagtttttttttttctt

SEQ ID NO: 1999 - DNA, 256 bp, Lilium asiatic
  Clone ID: LIB3229-037-P1-K1-H10
tccggtcgccagctcgtttttagggggggccatatctacggtcgacggtacctgcgtcttacacacgcggagagatgctatattgagagcggactgcgtctattgaggggggcgtgagaggcagaggcgtcgggaaggtctaaatgtggccggcggaggaaaggggcccgatcttacatttacacagggccgagtaagaacggatgggggcaggttggatgagaacgagccctaaggctccgatggcttattgtag

SEQ ID NO: 2000 - DNA, 416 bp, Lilium asiatic
  Clone ID: LIB3229-037-P1-K1-H11
accgacgcgcccgctggcacgaaggagacaaccgagggggcttatgactactcaacggtttcgaccgggttaccgtggcagctgcattccacggaagctggaaagggggagcaaggatcgtggatttgctgactgactgtgctatattgaagaggggggacgttgaagatgtgcaagagggtccttcggggaaaaggatactcaaattgctgggccgggcggtaggaaaaagtggtgcgccgaatccttacaatctctacgacatggagcccgtagttaagaacgagtatgggtggagcagtgctctggatgaaagtaactgcagtcccctcaaggactcccgcattggtctctactttgttagtctctcgccgggatcggatatggtgccacactgggatccattaacggcatat

SEQ ID NO: 2001 - DNA, 60 bp, Lilium asiatic
  Clone ID: LIB3229-037-P1-K1-H2
ggcagattgggaatggttatgctcctgtccttgattgccacaccttccacataggtggta

SEQ ID NO: 2002 - DNA, 406 bp, Lilium asiatic
  Clone ID: LIB3229-037-P1-K1-H3
cgcaattcgctcgagagctcgaagtcgccgacggtcttcggtcgagtttgcggagttgactcaagtttctagacaacaatgtcaatgggtatgatgaagccgctgaaggctggttttgaggagcagcccgacgctcaccgcattcggattactctttcttctaagaatgtgaagaacttggagaaagtctgtgctgatctcgttcgtggtggaaaagacaaggggttgagagtgaagggacctgtaaggatgcctactaaagtcttgcatatcaccacaagaaagtctccatgtggagaaggtactaatacctgggaccgctttgaactgcgtgtgcacaagagggtgatcgaccttgtcagttccccagaggttgtgaagcagatcacttcaataacaattgaac

SEQ ID NO: 2003 - DNA, 448 bp, Lilium asiatic
  Clone ID: LIB3229-037-P1-K1-H4
gcacgcaccggttcccggtccgcaattcgcgcatcgaccccggcccatatttttttgggtcgcatattatttatcttcgttatctaaaaattgatctgctactttttgaatgttatttttgattttaggattgaaatttgatatcctggtagagtgcatttgatgattgcatttttagaaattctgtgcctcattttgaatgttgttggttgatgtttggattttaatacaatcaaagccatcaatgtataatgggttttaattttgttactttgagataatatttgctattttaattttggggaattaggaactcaggcgcttctggatgaagtttttgtagattatgccctattacttaaagattatcattgcattgtgttgaggtttttgtctggctgagtgacttggttgatggttgacctttgttggtcagctaaacttttat

SEQ ID NO: 2004 - DNA, 397 bp, Lilium asiatic
  Clone ID: LIB3229-037-P1-K1-H6
gcgccacgcgtccggtgtccagagggagacagctgacggacaagaaggtgatgccactgctgagacggtgaaaaagagcagccacattacacggaagctggaaaagcggcagaaggataggtcacttgattcctccattgaggatcaatttggaggagggaggttgttggctgcgatctcttcacgcccaggtcaatgtggcagggccgacggatacatattggagggaaaggagtttgagttttacttcaagaaactcctgaagaaaaagggtggtaagagtggtggtgctgcctgagttatgatagtcgatttaatttgactggttttgtactgttgaggtcttctctctacttgtctttgttaaggttgtgaaagcattgggccattggtctta

SEQ ID NO: 2005 - DNA, 302 bp, Lilium asiatic
  Clone ID: LIB3229-037-P1-K1-H7
cggacgcgtgggcgaggagacccgtggggtgctgaagatctttctggagaatgtcattcgcgatgccgtgacctacaccgagcacgcccgccgcaagacggtgacggcgatggatgtggtgtatgcactgaagaggcaggggaggacgctgtacggcttcggcggctgatgggtttggtcttgtctattttctttttgttgttgaatgtttatcctaggaggacttctgttatgtctcgtgtaaaattatcagatttctcatctgatattgaattggagttggaagaagtttatttgagttg

SEQ ID NO: 2006 - DNA, 388 bp, Lilium asiatic
  unsure (1)..(388): unsure at all n locations
  Clone ID: LIB3229-037-P1-K1-H8
gcgctgatctcgctattgttcgtcattttctatgtgccggagactaaaggaatgagtttagaagatatcgagaccaagatcttgaaatgaaggcctagacaatgcctatgctatgagaatgtgcctgagacacaagggttgagtttagaggatatttagaccaagatctcgcaacgaaggtctagacaatgcctatgctatgagaatcgctgcatatttgtaagatgcagttaaataattagccatgttattgaataatcagntatttattattttataatttggttcctgctgccaactgtaatttcagttattgttgtttccgaacatttctttcaagaatttactatgtattaatagtgctgtaggccttcgaatgattttttct

SEQ ID NO: 2007 - DNA, 335 bp, Lilium asiatic
  Clone ID: LIB3229-037-P1-K1-H9
gctgactgaagaggacatcagagaaatttctgatgctgtgcccatggaagaggtagctggctcaagaacctttggaaattctgaaattatcacctggaagtacgcaaatacacctgctaaagaatgaaatttgggtctccctctccctgagtttatgtgcttgagtaactcagttatgcagccttgttttaccaaaatctgagtgcccatttaaggttcattatagttctggtttctatcaactattagaagcagatattaagtcatgtattatgtatatgtgagttacattatgggaggttttaaaaaatagaaatatgttctgagttcacttg

SEQ ID NO: 2008 - DNA, 312 bp, Lilium asiatic
  Clone ID: LIB3229-038-P1-K1-A10
tccgaagacatcattgtgggatctgctggaatcgacactgacctaccagcacaggacctatgcagaagccataaaaaaagtaattgcaaagccggttgcatcaagctagatgatggcgagattagatatctgagaatagtttacagtaggcatattgtgcggatgcactttcgaaattcctcacacagtagataatatatatgcatctaagtaattcccataatttttgtcgttagcttatactattgatatctgttacctgtattggtgaaaaaatgaatcttaatggacttaaatatgttgatttcatgt

SEQ ID NO: 2009 - DNA, 401 bp, Lilium asiatic
  Clone ID: LIB3229-038-P1-K1-A11
cggacgcgtgggccctagccgagatcccaccctcctctcccggcggctccgatttccaaccctcatcagatacaatgaaggtcattgctgcctacctcctggctttacttggtggaaactctagcccgtcaagcaaggatatcaagcatattcttggttcagttggtgctgatgctgaagatgagcggattgagtttttgcttgctgaagttaaaggcaaggatataactgagttgattgcttctggaagagagaaatttgcatctgttccatctggtggtggtggtgtggctgttgcagtgtcggcaggtggtggtggtgcagctgcccctgcagcagcagctgctgagccgaagaaggaagagaaggtggaggagaaggaagaatctgatgatgatatg

SEQ ID NO: 2010 - DNA, 390 bp, Lilium asiatic
  Clone ID: LIB3229-038-P1-K1-A12
ccacgcgtccgactggaaggaagattattggtgctactaacccggcggagtcggctccggggactattcgtggggatttcgctattgagattggaaggaatgtcattcacggcagtgactcagttgaaagtgcgaggaaggaaattggtttgtggttccctgatggcattgctggctggcatagcaacctccacccttggatttacgagtaagcagaagcagcagcagcagcttcgtatgatatatgaatagttgatggttgaagttaagttttggttcatgttgagagttatttgagagtctcggactcttgccaaacagttatttgtctaatgttattgagtcttgtactgcttttgctggagcttttgatgaataaacttcaacttc

SEQ ID NO: 2011 - DNA, 366 bp, Lilium asiatic
  Clone ID: LIB3229-038-P1-K1-A2
atactcgcacgtgcgcggacggtcgatacgataaggtcacatccgtagctattcctgtcgctctggcaggctcctgcctgttcctcattggtcgtgggatctacaatctgtctcacgggatcggaaagaaggaatgaaatgctgccttttgttaaataaacagcatggattgtttcccatacaaacttgcttctttatcctcgattgggttgtagtttcaatctctctgctttagtttgcatattgacagtttgaacttttcataagtgttttgaatgcctcttggctttgtaaacaagaccattgagttggcattgtttgtttttcagaattgctcaaaatgatagttttctcctatctggataa

SEQ ID NO: 2012 - DNA, 411 bp, Lilium asiatic
  Clone ID: LIB3229-038-P1-K1-A3
acctcacaatcttcagttttacgcttacgcttaaaggaagaaatgttcttggtggatgcaggacttggtacccctcaaatttgtatgcaagatgagcttactggagtgccaatcaatcgaaccaccagggttgagaataaagtgggattcctggacgtagtggcttgtgaatcactgatcaaaaagcgtattttggagagattcttcatcgatctagtggccggtgaatcactgatcaaagagcgagcagccaccaggtttaattcttttgtgggatccctggatctagtggctggtgaaccacttcttcttccacgaagattcagacaaaaccgagcttggatggaactgaagaagatttggcgaacgaagaaaaaggtcaaagggtttattattgacaaagtcaaagga

SEQ ID NO: 2013 - DNA, 277 bp, Lilium asiatic
  Clone ID: LIB3229-038-P1-K1-A5
cgggcgctccatctggtagttttctagggttgcccgcgggcagagctcaccttcactcctttgccgacgtagagctcacaggtccagcggcactggcgtacacccatgtccagaggatcatgactccatcccatcaatctcatcttcaggttccttcattagtaagctcggctccagatctgtgtatttcagcaccaagatctagaaatatgggggcgtatcattggttgtgatggacacattaatctggtgctggaccgtgctggtgagatcaatc

SEQ ID NO: 2014 - DNA, 246 bp, Lilium asiatic
  Clone ID: LIB3229-038-P1-K1-A6
cttgcatattctccaagcagtgcaaggatatcgccgtccagcccgtacagccaaacatcttcggaggacagcccaacttcttcaacattatcttctaccttttaataatattcccctttgagtgctatatatagagccttccagaccgggtaactctgggtctatacccgattacacgcccagttcacctctatacacagcaagcggggggtactctccaactgtgccggggtatttcccatactc

SEQ ID NO: 2015 - DNA, 406 bp, Lilium asiatic
  Clone ID: LIB3229-038-P1-K1-A8
cggacgcgtgggtgcagaaattcaaagaaaacaacaatctagttccaaacgagccggcaaaattgaatgccatgcctcgtgaaaattcttctgatgaagggtggcaagaggcaaatgcaagagggaagtctggacacttgcgcagaaaatatggctcgaaaagaccagccctttcgaagcttaacgtgaatagtacagatccttcgcatcctggagctgccagttataagagaacagtctcgccaaaaataaatttgaacaccacagtatcaagatccccttcaactgattacactcggaaaattctgaaggacgcaaatacgaatgttggacatcaggtaaagattcccgacatagaatcgaaatctgaaatcagtcaaaacgcttctgtcacgcctagacttac

SEQ ID NO: 2016 - DNA, 208 bp, Lilium asiatic
  Clone ID: LIB3229-038-P1-K1-A9
gaataagataagggaagattccctttatgtgcctaagtgtgggttccttatatgaagagatacactactcattgagattatggagataagttggcaaatcctctatgtagaaattatttaaggcttttctctctaatattatatatgaaagaaacaaaggtttatgaattattggataattcattaaactaattattttataaatatt

SEQ ID NO: 2017 - DNA, 408 bp, Lilium asiatic
  Clone ID: LIB3229-038-P1-K1-B1
gaaggtgattatatgttgccaccttcccttagaccccaacgcagcagcgccagaggcacttttatggaactacggcgaggtgaccgatgtgatacatcggtacaggtgcgtgaaggcttgtctggccggccatgaccatgaaggcggttattcggttgattcacatggtatttatcactgagttatcgaggctgctttggagtgccctcctgggagagatgcctttggtcatgtagatgtctactatgatcgtttgttcctctcgggtactgatagaatgccaggtactgagttgatttttggttcttaactgacgtattgctaatctgtttgatatttataattctgtttcttacctgggtattatggactatttatgacatcataatttaaagaagtaaaacaaaa

SEQ ID NO: 2018 - DNA, 398 bp, Lilium asiatic
  Clone ID: LIB3229-038-P1-K1-B10
ctccaatactatgagatctcagcaaagagcaactacaattttgagaagccttttctgtatttggccagaaagcttgctggcgatcaaaatcttcactttgttgagtcaccagcccttgccccacctgaggttcagattgaccttgtggcacaacaacagcatgaggcggagttacaaagggctatgttgcaaccccttccggatgatgatgatgatctcattgagtaggtgtgaaacttcttggtctggagagatggttaacctttgctgagttgtgggagagatgatctgacttttggtggttggatcttttctagtatattttgtagcgctgcatttaggagttatttggtggtactcttgtgtgttggaaaacctagttctggtttatgtgtctg

SEQ ID NO: 2019 - DNA, 401 bp, Lilium asiatic
  Clone ID: LIB3229-038-P1-K1-B11
gcatacccaactttatttaatttgatccatctgaattctgaaagcctacccagcttaccatgttcacttaaattgcttgacgaatcaacttaccgatttgaattgagagcatatcactacttacgtatagctggctagttgtttctactgggtgttaatatttcaatttgttgtagttttttagcttttaccttgttgtgattatgtgattaatcatcagaaaatggaagcattgtagcctaaaaattgaagccattactatttattgatactggatggttggtgcatgtaaaacatcagtgctgtcaatgtactacattttttttcccgttattgttgcggtaacgaggctctggtgtcagatcttttcctgatcttggaggcttggtagttgaagtcgc

SEQ ID NO: 2020 - DNA, 405 bp, Lilium asiatic
  unsure (1)..(405): unsure at all n locations
  Clone ID: LIB3229-038-P1-K1-B12
cggagccaggagatgggcggttcccccagtggagccaggcggagacgagggagctgctggcggtacgatcggagctcgatcgggcgttcatggagacgaaaaggaataagccgctctgggaggcggtggcggcccggatgcagatgaaggggtttgcgcggacgccggagcagtgcaagtccaagtggaagaacctggttacacgcttcaaggacatgaacacaactcattggctcattgtagactactactcagtgcttcattcatggcttgcaggggagcgaggggatggaggatgttgagagacagttcccattccacgctgagatgcaaagcatatacgccgcgcggcagtctcaagaggcatncggcgcaggcgaggaggaaacagtggcagggagcaag

SEQ ID NO: 2021 - DNA, 397 bp, Lilium asiatic
  Clone ID: LIB3229-038-P1-K1-B2
gaaggtgattatatgttgccaccttcccttagaccccaacgcagcagcgccagaggcacttttatggaactacagcgaggtgaccgatgtgatacatcggtacaggtgcgtgaaggcttgtctggccggccatgaccatgaaggcggttattcggttgattcacatggtatttatcactgagttatcgaggctgctttggagtgccctcctgggagagatgcctttggtcatgtagatgtctactatgatcgtttgttcctctctgttactgatagaatgccaggtactgagttgatttttggttcttaactgacgtattgctaatctgtttgatatttataattccgtttcttacctgggtattatggactatttatgacatcattatttaaagaa

SEQ ID NO: 2022 - DNA, 411 bp, Lilium asiatic
  Clone ID: LIB3229-038-P1-K1-B3
gagtgaaaggaagaaactacttcttgaaggacggcataatgttgacatggaatggatttctgaagtacggaagaagcggcattctctggttttaccaagaattgtgctggaagcatttccgtcggagttacttctaaagaagaagcaacagagtaaagcaattgatgccattgtaacagagtgcaataaatagggaaatgggatatgatggagttgtgctagagtcctggtcaagatggacagcctatggtgtactgcatgatccagatatgcgtagcatggcattacaatttgtaaagcaactggggaagaatctgcactccttgtcctccacgaatgatgctgctcaccgcctggagttgatttatgtgattcctgcaccccggtcagaaaatcttgaagtgcatgatt

SEQ ID NO: 2023 - DNA, 388 bp, Lilium asiatic
  Clone ID: LIB3229-038-P1-K1-B5
agaagattcttcgagaaagatgggtctagggatacggcttcttcctccatctttccagaatcctcaaagtcggggagtaaatgggtggagcttgagtcaaagaggaggaagatacgtgctggtgcagcttctgtgttactggcggggaatgtgaagccttcatcgtggctgcagaatcaaagtggcatggggttgaggcggaagtagttaaagttgagaatgatcggtaaacctcttcggccatgctgtttcttctcatctaatctctttggttttgagccatgatgactatgtacgaggtgagactttgatcggattccagggctttgttctttgtacagtaatgttgcagtagtccgtgcttggatgaatttgtgtacttattagc

SEQ ID NO: 2024 - DNA, 410 bp, Lilium asiatic
  unsure (1)..(410): unsure at all n locations
  Clone ID: LIB3229-038-P1-K1-B6
cccacgcgtccgcccacgcgtccggatccaactccaccaagcaatggagcagaccttcatcatgatcaagcccgacggcgtccagcgcggcctggtcggcgagatcattagccgatttgagaagaagggattctatctgaaagggctgaagatgcagaacgttgagcgatcgttcgccgagaagcactacgcggatctgtcctcgaagcctttcttcggcgggctggtggagtatattatctccgggccggtggttgcgatggtgtgggagggaaagaatgtcgttgtcactgggcgcaagatcatcggngctaccaacccggcggagtcggctcccgggactattcgtggtgatttctcgattgagatcggaaggaatgtcattcatggtagtgattcagtcgatagcg

SEQ ID NO: 2025 - DNA, 368 bp, Lilium asiatic
  Clone ID: LIB3229-038-P1-K1-B7
cggagccaggagatgggcggttcccccagtggagccaggcggagacgagggagctgctggcggtacgatcggagctcgatcgggcgttcatggagacgaaaaggaataagccgatctgggaggcggtggcggcccggatgcagatgaaggggtttgcgcggacgccggagcagtgcaagtccaagtggaagaacctggttacacgcttcaaggacatgaacacaactcattggctcattgtagactactactcagtgcttcattcatggcttgcaggggagcgaggggatggaggatgttgagagacagttcccattccacgctgagatgcaaagtatatacgccgtgcggtagtcttaagaggcatc

SEQ ID NO: 2026 - DNA, 389 bp, Lilium asiatic
  Clone ID: LIB3229-038-P1-K1-C10
atcccaccctcctctcccggcggctccgatttccaaccctcatcagatacaatgaaggtcattgctgcctacctcctggctttacttggtggaaactctagcccgtcaagcaaggatatcaagcatattcttggttcagttggtgctgatgctgaagatgagcggattgagtttttgcttgctgaagttaaaggcaaggatataactgagttgattgcttctggaagagagaaatttgcatctgttccatctggtggtggtggtgtggctgttgcagtgtcggcaggtggtggtggtgcagctgcccctgcagcagcagctgctgagccgaagaaggaagagaaggtggaggagaaggaagaatctgatgatgatatgggatttagctt

SEQ ID NO: 2027 - DNA, 393 bp, Lilium asiatic
  Clone ID: LIB3229-038-P1-K1-C11
ccataactccgatgaatatgactaccgccttcacgattggcgattaatacaatgctgtgctgcaaatccatgaacatccaccgaaggcgtggaggtcactatcaaggccaagatgatcaccgtcgtcggtccccgcggcaccctcacgaagaatttcaagcatctcaacctcgacttccagctcgccgaggccagccagaagctcaaggtcgatgcctggttcggatcccagcaagacgatggcggcgatcctaaccgcgatttcgcatgtgcagaatctcatcactggggtcaccaaggggtaccggtacaagatgaggttcgtgtatgctcatttcccgatcaatgcgtcgattacgaacgggaacacggcgattgagatcaagaattttc

SEQ ID NO: 2028 - DNA, 242 bp, Lilium asiatic
  Clone ID: LIB3229-038-P1-K1-C12
atacaactctcctctataggagtatcccctttacaattctcgataaagacgaatggtgtgcttatattccataatcatgcctttactcgttgaaatctctatcaacgccaggatgattatcaagcttattatccgatcaactatgactaataatttcaaatttgcggacgcaacattaagttgcttttacgaatggtagggacataacgtgattgtctgtttctttaacagagaaattttca

SEQ ID NO: 2029 - DNA, 409 bp, Lilium asiatic
  Clone ID: LIB3229-038-P1-K1-C3
gaaaagatcagagtgactcgaagtccctcacccagattatcattcctcgcctattgaaagtcatggttgtattatgcaaaatctgccgatctactcctgtaatcgttactacctgtgcctactgggaaagatatactaccatcttttgcatctcagaaacagagagagctctacttccgaggtctgtaatggttgtacttgttaatgtgttgctgcggattggaaaaatatgacaactggtttatttactgagactgcaagacttagttgtgttccagtgttgatttgatgaatgttgatcgtatttatttgtttatgaatatgtgaaatggtttatttacttggactacaagagttagttgtgtaccagctgtgttctagcgttgatctgatgaatgttgatcatttc

SEQ ID NO: 2030 - DNA, 328 bp, Lilium asiatic
  Clone ID: LIB3229-038-P1-K1-C4
cccacgcgtccgatggtttcaagttggatgatgatgagcctgaggactttgccaataagcgagggtgatggatcctctcctatgagccaacatctgttctaatatcgggctgtgaaattattaggaatgatggatatttatctggttaaataagactggatctttctgtgttctatagtgtgtgagactttgttaccttttcttctttatggtcacaagtccgaaacaattgagtgcgactttactgtgtaaatgctcaacgtttgcaggtacaacatttgttctaatgagctgagttgctccgaaatctaaatctatagttcagcag

SEQ ID NO: 2031 - DNA, 408 bp, Lilium asiatic
  Clone ID: LIB3229-038-P1-K1-C5
cggacgcgtgggtgttaggcagctagaggctctgatcaggttgtctgaagccattgctcgaagttacttagacaaagaggtacttccatcacatgttcgcatggctgttaagctgcttaaaacatcggttatcagtgttgaatcaagtgaaattgatctttctgatttccaagatccagaagatggtgttgggaacagagttcctagccagggtgatgaacagccaactgctgatgccggtccaccacctgagaatgaaggtggagagcaagggaatggtggccgtcagaagcagaaaatggttattactgaagaacattttcagaaaattactcaagctctgattatgcgacttagacagaatgaggaggctgtccttcgagatggaagtggtctggctggcatgaa

SEQ ID NO: 2032 - DNA, 402 bp, Lilium asiatic
  Clone ID: LIB3229-038-P1-K1-C7
cggcgcatccagaaggagttgaaggatctacagaaagaccctcccacctcatgcagcgcaggacccgtgggtgaggacatgtttacttggcaagcaactattatgggtccgcctgatagcccatacacaggaggaatctttcttgtcactatccattttcctcctgactatcccttcaaaccaccaaaggttgccttcaaaacaaaggtgtaccatccaaacatcaacaacaatggaagcatttgccttgacattctgaaggagcaatggagtcctgcattaacagtctccaaggtactgctttcgatctgttcgctgctgacggacccgaacccagatgatccactggtgccagagattgcgcacatctacaaaactgatcggactaagtatgagacgacc

SEQ ID NO: 2033 - DNA, 401 bp, Lilium asiatic
  Clone ID: LIB3229-038-P1-K1-C8
cggacgcgtgggcagggctggtcgatttggaactaaaggactagccattacatttgtctcgtctgcctctgactcagatattctgaaccaggttcaatcaaggtttgaggtggatattaaagagctgcctgagcaaattgaatcatccacatacatgcaagcatgatttttgtgggtgtgggccatatgcatggtgcagttgtatttgcgtctagggccactatgtagcaatgcctcaaatgttatgttggttcaagcagcatttgcacggagaattaatatgtttaactgtactttgtcctagtggtccttactttctgttggattagattgagtaggtagatgtttcaaaagttttctaccttggtcttgttttctgaatttatttaagatgagtagtg

SEQ ID NO: 2034 - DNA, 297 bp, Lilium asiatic
  Clone ID: LIB3229-038-P1-K1-C9
gtgctagattgggagcggtcgctttagaggatccaagattacgttcacgttcatgcgacgtaatttgtttactatagcgtgaactaaatgcaattcactgagcggacagttacagcgtggagactgaaaaaagccttgggctgccgaactaaatatgattgaaagacatatgtattctaaaagttaacagtaataacggagagggccgtgccagatcgatcttgcataagtgtggcagcctgatatgagcaaatgggacactcactgtagcgagccattaagcatcgagctatgtgg

SEQ ID NO: 2035 - DNA, 406 bp, Lilium asiatic
  Clone ID: LIB3229-038-P1-K1-D1
ctggtggtgagaagatttacaatgtgttcgataatcaacttccggcagctttaaaaaggctccagtttgacaaacagctttcaatggaaaatgtaagaaagttaattactgaagctgatggataccagcctcacttgattgctcctgagcaaggataccgccgacttattgaatcggccttggttagtattagaggccctgctgaggcaactgttgatatggttcactcaatattgaaagaactcatacacaaggccgctaatgagactgcagagctgaggcaatatcctactctcagagttgaggtgggaaacgcagcttttgattcattggagagaatgagagatgaaagcaagaaggctactcttcagctagtagacatggaatgttgctatctgactgttga

SEQ ID NO: 2036 - DNA, 387 bp, Lilium asiatic
  Clone ID: LIB3229-038-P1-K1-D10
ccatttctccctcagaaccctagtttgttttcaaaacagctgagatggagaccggatccaaggccaagaagggcgccggcggacgcaagggcggtccaaaggctaaatcggtgagtcgttctgtaaaggccggacttcagtttcctgttggcaggattgggcggtacctcaagaagggtcgatatgctcagcgtgttggttcaggagctcctgtctaccttgctgccgtccttgagtatcttgctgctgaggttcttgaattggcgggcaatgcggccagggacaataagaaaaatcgaattgtgcctcgacatgtgtgtttggcggtgagaaatgacgaggagcttgggaggttgttgggtggtgttaccattgcccatggcggag

SEQ ID NO: 2037 - DNA, 121 bp, Lilium asiatic
  Clone ID: LIB3229-038-P1-K1-D12
gcattagatcgtgagaaccctatctagatgataaaacattacatacggggacaggggacaaggtaaatatggtatcgggtcaactaaaaggaagtcaatgggctaaattttacaacggaac

SEQ ID NO: 2038 - DNA, 385 bp, Lilium asiatic
  Clone ID: LIB3229-038-P1-K1-D3
cttcaatctcttgtagttctctcaccttcgataacgatgtcttcttgctgtggtggaaagtgtggctgcgggtcttcctgcaagtgtggcagtggatgcaatggatgtggtatgtatcctgacttggctgaggggagcactgcctctaccactatgatcatggggtttgctcctgctaagggggagtttgaggggtttgagatgtatgctgagaatggtggctgtggctgcaagtgtggtgataactgcaactgcaacccctgcaagtgtggcaagtgagctctccatgagaggaggatgtagggtttgataccctttgtttacttgtttctgttgtagtgctgaataatggccatggtttacatgatgcaagcttttttgcacc

SEQ ID NO: 2039 - DNA, 403 bp, Lilium asiatic
  unsure (1)..(403): unsure at all n locations
  Clone ID: LIB3229-038-P1-K1-D4
actggtaattcgaaaggctatgccttctgtgtttaccaggacctctctgtcacagacattgcctgtgcagctcttaatgggattaagatgggagataaaactcttactgtcaggcgtgctaatcagggcactacccagcctagaccagagcaggagaatgtactattgcaggcgcaacagcaagtggcattacagaggctggtgtaccaagcaggatcccttccaacccttaccggaccccttcctacgaaggtgttatgcttgacccaggtggtgaatccggaggaactgaaagaggatgaggactatgaagatatattggaagacatgaggactgaaggcggaaaatatggcaatcttgtgaatgtcatcatccctcagccaggcccgaatggngagatgg

SEQ ID NO: 2040 - DNA, 379 bp, Lilium asiatic
  Clone ID: LIB3229-038-P1-K1-D5
actggtgattcgaaaggctatgccttctgtgtttaccaggacctctctgtcacagacattggctgtgcagctcttaatgggattaagatgggagataaaactcttactgtcaggcgtgctaatcagggcactacccagcctagaccagagcaggtgaatgtactattgcaggcgcaacatcgagtggcattacagtggctggtgtaccaagcaggatcccttccaacccttaccggacccctttctacgaaggtgttatgcttgacccaggtggggaattcggaggaactgaaagaggatgaggactatgaagatctattgtgagacatgaggactgaaggcggaaaatatggccatcttgtgaatgttatcatgcctc

SEQ ID NO: 2041 - DNA, 400 bp, Lilium asiatic
  Clone ID: LIB3229-038-P1-K1-D7
cggacgcgtgggaccatttccaaaagcgatgggagcagcgccagctcggatcaggatgcaggtgatttcaggcaacagcagtcgctcccaatgttccgccgtcgtggtgccttgatcaagaataatttcaaaaggcggtttaccctgaaggggaaggtcgggaaggagctctttgggacaaacatatttcgtaagaccggacagtcgtcttcatcggtgggtgaggatgttaatcagccagggtgctcgagggctcggcacacttctcgattctccggggtgcattcaggaacaaaatgaagcccaggtattttagaaaacttttttttttggtctgttctgcagtatgtaaaatattaaatatgtagaaatctaaggttataatatatcataagatatg

SEQ ID NO: 2042 - DNA, 352 bp, Lilium asiatic
  Clone ID: LIB3229-038-P1-K1-D8
cggacgcgtggtaccatttacaatagcgttggtagcagcgccagctgggatcaggatgcaggtgatttcatggcaacagcagtcgctcccaatgtttcgccgtcatggtgccttgatcaagaataattttaaaaggcggattaccctgaaggggaaggttgtgaaggagctctttgggacaaacatatttcgtaagaccggacagtcgtcttcatcggtgggtgaggatgttaatcagccagtgtgctcgagggctcgggacacttctagattttacggggtgcatttaggaacaaaatgaaccccacttattttataaaacttttttttttgtctgttctgcagtatgtat

SEQ ID NO: 2043 - DNA, 234 bp, Lilium asiatic
  Clone ID: LIB3229-038-P1-K1-E1
cccacgcgtccgcccacgcgtccggcagcacccttgcttttactcttttggactcaacttgttagaagagccatgttataaaagactgtaattttaggagcagtgtggaggatgtcaatcagtatggacccattcagtaggatcagattgattggctctccttgtaatgcttgctctttttctttggaatatttggttgatattttaatctattgctagagaattaagcagctt

SEQ ID NO: 2044 - DNA, 345 bp, Lilium asiatic
  Clone ID: LIB3229-038-P1-K1-E10
caggatgcaaacagctgagcagcatctagagaaaggtaaccagaaagactggaagcttcttgttgaataagggaagtctactcttgatagcatgaatgaagaaggtccttcaggtcatgccagatattattggatatgatctcaacatcacaaggaccaacaagagtgcgacgggtgctataaaaacacccttgtttatgcgccttacacaacagctgaatctctacaagaatcattcaagctcaatatgtgattggacctatacctttctgacttatggcgtgacaacatatataactacatggagccgctataccatccaactatcactagtctttgtggaac

SEQ ID NO: 2045 - DNA, 390 bp, Lilium asiatic
  Clone ID: LIB3229-038-P1-K1-E11
ctggatccaaacagctgagcagcatctagagaaaggtaaccaaaaagactggaggctgcttcttgaataacggaagtctacttttgatagcatgaaagaagaatgtccttcattacatgccagatattattggatatgatctcagcatcacaagtaccaacatgagttcgacggatgctataaaaacacccttgtttattcgccttacacatcagctgaatctcttccagaatcattcaagctcaatttgtcattggacctatacctttctgacttatggcgtgacaacatatatgactacatggagccgctatcccatccaacaattactagtctttttggaacaaaagcgcaatggtgttcatcaacattcatcatgcatttaatact

SEQ ID NO: 2046 - DNA, 382 bp, Lilium asiatic
  Clone ID: LIB3229-038-P1-K1-E12
agaagacaagacccccaatctcatcgacgatggcgatgaagaaatccgcggcgatcgccgcgatatgggcgccgctcctcctcatcctctcttgcttcctcctccgcccggtcctcgcgcttccggccgggtctggtgatggatacacgattaccggtcggatcaagatcgacggtatttcatcaaaaggatttggctttcctgcaaaactatcaaataccaaagtcattctcaatggtggtcagagggttacgtttccgagagcagatggttatttttcattccacgatgtacctgctgggactcatcttattgaagtagctgcattgggatatttcttttcaccggttcgtgttgatatcagtgctagaaatcctggtaa

SEQ ID NO: 2047 - DNA, 404 bp, Lilium asiatic
  Clone ID: LIB3229-038-P1-K1-E2
cccacgcgtccgcgccgagagggtcggcgccggcgctccggtctatctcgccgccgtcctggagtatctcgcagccgaggttttggagttggctgggaatgcggcgagggataacaagaagactaggattgtaccgaggcatattcagcttgctgtgaggaatgatgaggagctttcgaagttgctggggatggtgactattgctaatggtggggtgatgccgaacatccacaaccttcttctgcccaagaaggctggttcgtcaaagtcggcggctgctgatgaggaagcttgagttgtttgttgacctgtgtctctagttgcgtgtggaattatgggtcttgtttgttagatatattctatttttccttgggctgggctttggatctcttctggacgtgtag

SEQ ID NO: 2048 - DNA, 245 bp, Lilium asiatic
  Clone ID: LIB3229-038-P1-K1-E3
gccttattattttagctatttggttgtcttttaacttctttttttccttgtcgcctgcctattttcggtttcttttgtacttgggatattttagttgcgttttagtttcccctgtttgtttcatgactaggtcagttggggaattataatgatttaaggagggattatattgatggattgtgactatattctattagtaaagatgaaaacttagtgaaccaaacatacacaaccttattatgccc

SEQ ID NO: 2049 - DNA, 321 bp, Lilium asiatic
  Clone ID: LIB3229-038-P1-K1-E4
gtcgagctgtgcggatgaagaaggccgtgctctttgccgcgttcatcgctgccgcctcatcagtaaccattgtctccgccagccccgcttctcccaaagagggtttggcctccgccggattgaggaagttcacaagtctcgacggcctgagattcatcgagacgctcgtcacggcgcaccgctgatgttgaggctcttagccgtcatgatatcgaatatgtttgtgctaatttagtttctcatatttgttttgagctgtaatggatctttaatttctcctggtgctccttcagatctaagttatttctcatttgcttttca

SEQ ID NO: 2050 - DNA, 357 bp, Lilium asiatic
  Clone ID: LIB3229-038-P1-K1-E5
gtcaagctgttcggatgaagaaggccgcgctctttgtcgtgttcatcgttaccgtgtcatggggcaccattgtctccgccagtcccgtttcttgcaaagagggtttgttcatggccagaccgcatacgcatacaagacctcgaaccgctcggactcttctggactctgacaccctcacgcctggtgatgttgacgcaatgttgtcaacaggctaatgaacctgaacatgctagctccgtcgaagcagtcctgctggacccttattgaagggctcaccgactttgatgctgctgtctgtctatgcaccagcatcatatggctgtatccttggcatcatactggagtcggaggttgttc

SEQ ID NO: 2051 - DNA, 233 bp, Lilium asiatic
  Clone ID: LIB3229-038-P1-K1-E6
ggcgagctgtgccgctgaggaaggccgttctctttgcccaatttatctctcccgtgtgatgggggaccattgtctcctccagtcccatttgtcccaaacagcgtctggccttcttcggatcgcggtagttcacaagtctggtctgccggagattcttggggacgctcgccacggtccaccggtgatgatgacgctctttgtcgtcatgatagtgaatgtgttcgtgctaactc

SEQ ID NO: 2052 - DNA, 350 bp, Lilium asiatic
  Clone ID: LIB3229-038-P1-K1-E7
agaagacaagacccccaatctcatcgacgatggcgatgaggaaatccgcggcgatcgccgcgatatgggcgccgctcctcctcatcctctcttgcttcctcctccgcccggtcctcgcgcttccggccgggtctggtgatggatacacgattaccggtcggatcaagatcgacggtatttcatcaaaaggatttggctttcctgcaaaactatcaaattccaaagccattctcaatggtggtcagagggttacgtttccgagagcagatggctattcttcattccacgatgtacctgctgggactcacttcattgaagcagctggcgttggattttcctttcacccgttc

SEQ ID NO: 2053 - DNA, 405 bp, Lilium asiatic
  Clone ID: LIB3229-038-P1-K1-E8
cttacatttgtctcccccctgcaggaattgcatgaaggacggtggagatttcacgcatgcgagcaaaagctatcaagcaaggaaggaaacgatcatgcacggagggccgagatctgaagaagatgctggatggctctgatgaggtgaaggtacgatgtgcagttctgatctgacggcgaagaggaaggccgtgcatggagcttctagaggcgcatgtggaaggagctctccattggacgcgcatgtgaagtgctcgaagcagaagacggtgccgggccgaagtcgaagtctataaaagcacctagccgatcgacgatttctctcaagtctcagacgaagaagatctctcattctctgagcctccttcatccaggaactctgcttagtgacagagtcgagtttggg

SEQ ID NO: 2054 - DNA, 321 bp, Lilium asiatic
  Clone ID: LIB3229-038-P1-K1-E9
tttactttcaatggcatcttttgggatgggagcatcacttatggtgggctacctccaagatgcttggtacccaacaagaggtttgtggtgcccattcctgataatgtgccactggactcagaagctcccctactttgggctggaatgacagtttccggccctatgaaggaccatattatgcttaaggcacctaaaaacctaggattagaaggcctggaaggcctggaccttgtggtgtgaaagttggaaagggcttccggcctgaccgtacaatggttagtacctcttcattccagggaaaagagaggccaacttaacttg

SEQ ID NO: 2055 - DNA, 209 bp, Lilium asiatic
  Clone ID: LIB3229-038-P1-K1-F12
cgaagtcgatcatgtttacctccaaagaaacaaattatacgtttgctgggaaagaactgataacctgtattactctttacagagagcaaaactagatggtgatattataccatgatatgttataaatctcttctgtaaggtacttgtttgctagaaattgatcccacatgaaataacaacgtggtcacaataataattttttaattcat

SEQ ID NO: 2056 - DNA, 175 bp, Lilium asiatic
  Clone ID: LIB3229-038-P1-K1-F3
agaatttgagaaatatattgtttcggagtttctgcttgttattttaaaagcttgtgtaacaatatctcatttgtgtgccagtcggatactgtctcctgcgtattatgagattgcaatatacaggagatatcaattgatgtacggtacactaccaatttcttattctcacttatct

SEQ ID NO: 2057 - DNA, 400 bp, Lilium asiatic
  Clone ID: LIB3229-038-P1-K1-F6
gctgaccgtttgagcaaggaaatcacagcgctcgcccccagcagcatgaagattaaggtggttgctccacccgagcgcaagtacagtgtctggatcggaggatccatccttgcttcgctcagcactttccagcagatgtggatttctaagggtgagtatgatgagtctggtcctgcgatcgtccaccggaaatgcttctgagtgcgctattggaacaatcgacttgtggtttgaaactcctgtagtatgcgcctttggtaacctagagttgaagtcggagagtagagttgtttcttttgatgatcattgttgtttatttgctatgttggttatttggtgtagtaggcgatggagtctgttgcttgggttgtggatttttagtaaaaacagcttgagagtg

SEQ ID NO: 2058 - DNA, 404 bp, Lilium asiatic
  Clone ID: LIB3229-038-P1-K1-F7
cttccttgacccagaatggcttgatggctcgctaccaggagactacggcttcgaccccctcggcctcggcaaggaccccgccttcctcaaatggtacagagaagcagagctcatccacggccggtgggcgatggccgccgtcgtcggcatcttcgttggccaggcatggagtggcatcccctggtttgaagccggagccgacccgggcgccatcgcccccttctccttcggctccctcctcggcacacaactaatcctcatgggctgggtggagagcaagaggtgggtggacttcttcaaccccgagtcccagtccgtggaatgggccactccctggtctcgcactgctgaaaacttcgctaatgccaccggtgagcagggatacccgggaggcaagttcttcg

SEQ ID NO: 2059 - DNA, 401 bp, Lilium asiatic
  Clone ID: LIB3229-038-P1-K1-F8
gacaattgtgaggagctcatcccggagtacctaagctttgtcaagggtgttgttgactcagatgacctccctctcaacatctcacgtgagacacttcagcagaacaagatcctgaaggtgatcaggaaaaaccttgtgaagaagtgcctcgaaatgtttgctgagattgccgagaacaaggaggattatgccaagttctatgaagccttttcaaagaatctgaagctgggaatccatgaagacagccagaacagggctaagcttgctgacctcctgcggttccactccaccaaaagcggggaggagatgaccagtttgaaggactatgtgaccaggatgaaggagggtcagaaagatatctactacattactggagagagcaagacagcagttgagaactc

SEQ ID NO: 2060 - DNA, 333 bp, Lilium asiatic
  Clone ID: LIB3229-038-P1-K1-F9
atctgtccctccgatcaaggacaaggagagcgcgccatccaacacaccgccgatccgaaggttcaatcctaccccaatgggggtatggcctgtttcgaggcaaatggaaatccgaaatccgaatgtcggtatcgacttgatgcaagggtagcaatgtttgaggtgtaaatgtggtattggctagcgatggttgggagaatattagatgaagaacgagaacccccatttattctcttatgaattcctgcatcatttatttgcaggtatagtttgtagtaacatggaagtctttggcatcaaacttaatattagatggtattggtagatttattt

SEQ ID NO: 2061 - DNA, 380 bp, Lilium asiatic
  Clone ID: LIB3229-038-P1-K1-G1
caagagggagctggacgggattcaggtggaattgcaagcgactgaccctactgagatggacctcgatgtgattcgaggccgtgccaattaggtactacctgtgtttcttacaaaggagaatttctccatgcattctgtggttgcttttgcgagatgtttatagtctcatgggaccgttaatttgctagatatcatgtgtgtttgttgttggtacagttatgatctttgatttcggtatatcgttttgttgttatattgtgggatctatgtgacaaggtcttgtagctttgtgctcacaagctgataatatgtaactgctgtgtttatcgcctgttcggcttacgttatcttgtttaattctaaaaatggatgtttttatc

SEQ ID NO: 2062 - DNA, 403 bp, Lilium asiatic
  Clone ID: LIB3229-038-P1-K1-G10
tcggcagtgaacgcaatatgctatggggcgaagctgatgattcccggactgctgaggtttgagaacgagattgagaatggggaggaggttgttctgatgacgacgaaaggggaggcgattgcactggggatttcggagatgactactgcagtgatggcgacttgcgatcatggagttgtggctaagatcaagagggttgtgatggatagggatacttaccccaggaaatgggggttggggccgaaggcgatgcagaagaagaagatggttgctgaagggttgcttaccaagcatgggaagccgaatgagaagacaccggcagagtggatgcggaatgtggtgcttccgactggaggggattcagtgattgcgagtattgctgcggctccggagcccgtggtga

SEQ ID NO: 2063 - DNA, 300 bp, Lilium asiatic
  Clone ID: LIB3229-038-P1-K1-G3
gtgtaaaaacaaatatctgtaaaatctctcatgggaaggtgcatcgaaatgcaagatcgtggggtaaaagaagaaccaatttttttttatactttccctgggctcttttgttattatgttaatgtatgattgtttcccatttcactgttatgtattatttattagcttaatttcattttacctccctatgttttaaccaatgttgcattttttgatttgaggtttgatttttgtcaattaaatccatgtgacttattttattagcaaataaaggtaacttttgtaaaatgactttttttc

SEQ ID NO: 2064 - DNA, 272 bp, Lilium asiatic
  Clone ID: LIB3229-038-P1-K1-G4
tccacacaacctatacttaaatcatatataatcattttcaacactgcaaaacacgaccgattgttgacttactactattctaaggctactacaaaacatcgacttttctcatactattgaaaaacatattcacttccaataaccaccaaaaccaccttacttatatcaaaaaacactctatcaaacatacttaataaccaattaaactattattacaatcacacctacacccctttatataaaaccaatctatatatatataaatataaata

SEQ ID NO: 2065 - DNA, 411 bp, Lilium asiatic
  Clone ID: LIB3229-038-P1-K1-G5
acccgctgtggtgccactagaaccccccatttaaacaccccactccgcgagcaactcctcgtgaccaactctccaacctccgcagagatcacaccagagagatcaaccatgaacgcccccgaccgctacgagcgcttcgtcgtccccgatggcatcaaaaaggtttcgcacgagagagacacgaagattatcaatgccgcttccttcaccatcgagcgggaggaccacacctttggcaacatcctccgcatgcaactgcaccgggatccgaacgtgctcttcgccggctacaagctgccgcacccgctgcagtacaagatcgttactaggatccaaactacaagccagtcttcgccgggccaggcgtacaaccaggcggtcagcgatctggacagggaggtccagcatctg

SEQ ID NO: 2066 - DNA, 359 bp, Lilium asiatic
  Clone ID: LIB3229-038-P1-K1-G6
gccggcgctgttttaaaccggaagggcgccgacagggccaagctttcagaagctgctgaagagatgctcgcggctgcagaagactacggcaggctgggggagggcagctacggggcgtacatcgaaaaggccgaggggtttctccataagtatcacgcttcagagtctgaccatggaaccggtaactccgccgccggtaagactgagcacgctcctgcgaagccggcgagggatgatgatgaggaggaatctgagtccggtggagggtttgggggttacatgaagatggctcaggggttcttgaagaagtgattcagagtatggtatgcttttaagttttagggattactagtttgtgt

SEQ ID NO: 2067 - DNA, 363 bp, Lilium asiatic
  Clone ID: LIB3229-038-P1-K1-G9
atcgctcggtacccttcaggacgccataaattcctatctggtgaaggaaacatccatggaagaagtggtatgtatgtattacactatagagatgcttgacatgttggaagttctgcatgatgctggtattattcatggtgatttcaagcctgataatctacttgttcggtgtgcaagggatgagctgacagaggatggattcagggacagaactggaccttggcgtgatcagggtctgtgcttggtggactggggaaagggggtcgacctaaacctctttcctaccaatacggaattttatggcgattgcggaacatccggcttccgttgtattgagatgcaagaaaatagaccatggagata

SEQ ID NO: 2068 - DNA, 390 bp, Lilium asiatic
  Clone ID: LIB3229-038-P1-K1-H12
gccggaagtttcttctttaccggatttcaagtccgccttccccaaatggcctgctaaggatttggcaactatggtcccaaatcttgagccagaaggaatagatcttctttctcaaatgctccgtttggaaccgagcaagcggatcacagctcggcatgctctggagcatgagtatttcaaagacctcggggtggtgccttgagctgtgccctcgatgctgctgtacattatctcgagaagaagccgcgggcagcagttattcgtgaatgtatgagacattcttcttgtgttgtttccctgtatgtacccgcatgaactagttgtgtagagatgcctatcgtcggatagtagaattcgtgttgtagcttgctgctgaaccagttttctccc

SEQ ID NO: 2069 - DNA, 374 bp, Lilium asiatic
  Clone ID: LIB3229-038-P1-K1-H4
gttggtttgtcaacgggtcagatcaagactggtgctccatgccgatctgagcgtttggccaagtacaaccagctcctcaggatcgaggaagagcttggtgctagtgcagtctatgcaggtgccaagttcagggcaccggttgagccttactagaggaagtagatgactgctgaatgtgtttcagggccttttgttggaagagagttttactttgagcagtaagtttaataatgagataattttgcagtgttggtccatgttttggactggttaatgatgtaggatgcatctctaatccgagtgtaaaagtttgaatatgacatcagagtttggttgccatatataaatctaccggtttaagtgtttggtagtgt

SEQ ID NO: 2070 - DNA, 374 bp, Lilium asiatic
  Clone ID: LIB3229-038-P1-K1-H5
gttggtttgtcaacgggtcagatcaagactggtgctccatgccgatctgagcgtttggccaagtacaaccagctcctcaggatcgaggaagagcttggtgctagtgcagtctatgcaggtgccaagttcagggcaccggttgagccttactagaggaagtagatgactgctgaatgtgtttcagggccttttgttggaagagagttttactttgagcagtaagtttaataatgagataattttgcagtgttggtccatgttttggactggttaatgatgtatgatgcatctataatccgagtggaaaagtttgaatatgacattataggttgcttgctatatataattctaccggtttaagtgtttggtagtgt

SEQ ID NO: 2071 - DNA, 313 bp, Lilium asiatic
  Clone ID: LIB3229-038-P1-K1-H6
gcccggagtttcttctttaccggattttaagtccgccttccccaaatggcctggtggggatttggcaactattgtcccaaatcttgatccataatgaatatatcttttttctcaaatgctccgtttggaacctagcaagcgtatcacaagatttgcatgctctttagcatgagtatttcaaacaccccttggtagatgccttaactttgccctttatgcttatttacattatactcagaaaaaaacgctgtcagcatttatctctgaaagtatgaaacattcttcctttatttctaccctgtatgttccccca

SEQ ID NO: 2072 - DNA, 401 bp, Lilium asiatic
  Clone ID: LIB3229-038-P1-K1-H7
cggacgcgtggggtttggggcccacaaaagacttaggccaaatggtttgcggaagctgtcgtgaattactgtcttatcctctgggagctaagcgtgtgcaatgtccttgctgtgagacagtaaactttgtattagaagctcatcaagttagccttgtggagtgtgagaaatgttctgtgctgctgatgtaccagcatggagcaccatctgtgagatgttcagattgcaattttgtgactgcaattggagagaacaatgtttgatccctggcttcggtgttgcgaggacaaactcctcagccttaagcgatattttctgaggggacgcagtttgtataaccacttatgcaacatacttcaaatttatcaacaggagatcaatgttcgaccccatcttcagtg

SEQ ID NO: 2073 - DNA, 354 bp, Lilium asiatic
  Clone ID: LIB3229-038-P1-K1-H8
agcttggtctgcattcccttcgtcagaggcactggtacatccagagcgcttgtgctacttctggtgaaggcttgtatgaagggcttgactggctctccagcaacattgccagcaagggttgattgtgaaactatggattcccaatctcagagcagtatccaacggcgtagtggattctcttcggtcaccagtctctttgccgtttattttggacttgatattacctctctagtttttgctgttgtaaaactatatgtttttaagcttgaattgactgcagttactgtcgtaccgtttaaaccagtatatgtttgtgatacccttgtttctaatctgaagaatgttgcactttct

SEQ ID NO: 2074 - DNA, 261 bp, Lilium asiatic
  Clone ID: LIB3229-038-P1-K1-H9
attcgatcaggggatgtcgatcgactctgtcgctcaagcgatcggctctttcagtggcttgatggttcagtatcatatatcggattaagattacatgagtatgtagctgtgtgtgcgatgatttagctagcgatgtctagtctaacaaacatgcaaggaataaacagagtggatgatgttggtgtctatttgcttaaaatggtaagatttaggttatgtattaaggatatgtatggtatatttagctttatgtctagtctc

SEQ ID NO: 2075 - DNA, 289 bp, Lilium asiatic
  Clone ID: LIB3229-039-P1-K1-A10
cccacgcgtccgagctcgcggtgcttcagttttacaaggttgatgattccggcaaggtggtgaggctgaggaaggagtgcccgaatgcggagtgtggtgcggggacgttcatggcgaaccactttgataggcattactgtgggaagtgtgggctgacgtatgtgtaccagaaggccgaaggtgagtaagctggcttgctcggtttgttggtttagtttctgaaagaacattgttgtgttggcattcagtttcaaggctgatgatttaggtgagatgttgatggatacct

SEQ ID NO: 2076 - DNA, 328 bp, Lilium asiatic
  Clone ID: LIB3229-039-P1-K1-A11
cacgtgtcccggaatgtacccgactcgtacccacgcatgcgatctgctataggcgatgtgttaccgagacccgtgctagttgaggcttcttggatgggctacgtggtggaattggaatagccagcggactattggctggtgccaccattatttatggaacatgtgcaagtgatggattactaccatgagtatgacgtagatatagttcacccgactaatgcatgcattcataaccttgtcgacaaggtaagaagtgttcgatgcaatagctgatcttgatggacagaaataggaaggtcgggctcttggagtgaatgtatgtgaaaaa

SEQ ID NO: 2077 - DNA, 400 bp, Lilium asiatic
  Clone ID: LIB3229-039-P1-K1-A12
gtttgataacgctcacatcagacttactctaacacgtgggaaaaaggttacatctggaatgagcccagcatttaacctctacggctgcactttaattgtgcttgctgaatggaaaccaccagtttatgataactcaggcggtattacattggtgactgcaaccacgcgccggaattcacctaataatgttgattcgaagattcatcacaacaatctaatcaacaacatactggcaaaggtagaaggcaacctggccaaggcagacgatgcaatcatgctagacaaagatggttttgtgtcagaaacaaatgctacaaacatttttatggttaaaaaagggcatgtgtctacacctcatgctgactattgccttccaggaataactagggcaactgtcatg

SEQ ID NO: 2078 - DNA, 413 bp, Lilium asiatic
  Clone ID: LIB3229-039-P1-K1-A2
gcgggcgccgtcgcatccgccgatccagtctccaattctccgtcgccatgtcgaggaagaaggtgcgagagcccaaggaggagaatgtcacgctcggtccgaccctgaaagatggcgagcatgcgttcggtgtagctcacatcttcgcgtcgtttaacgatactttcatccatgtcactgatctgtctggaagggaaactcttgtacgcatcacgggtgggatgaaggttaaagctgacagggatgagtcctccccttatgcagctatgcttgctgcacaggatgttgccactagatgcaaggaactaggcattacagcactgcatattaagctcatggccactggaggcaataagacaaagacacctggtcctggtgctcaatctgcccttcgagcccttgctcggtctgga

SEQ ID NO: 2079 - DNA, 432 bp, Lilium asiatic
  Clone ID: LIB3229-039-P1-K1-A3
aaccacgcgcgacccacgcagtttatatgagttcaccgagagagccaatgacaagagtatgccgaggggatgggtctctgccgctcttgcccttcctgctgcagcgtacatgcttcaagactatgaagtccatgcagcagagatggagcgcacatttattgcaataaaacctgatggggtgcaaagaggactgatttcggagattatatcacgttttgagcgcaagggatttaagcttgtggccattaaattggtagttcctacaaaggactttgctcaaaagcactaccatgatctgaaggaaaggcccttctttaacggcttgtgtgactttttgagctccggtcctgtgcttgcgatggtttgggaaggggagggagtcataaaatacggtcgaaaacttattggcgccacaaacccacaaaagtctga

SEQ ID NO: 2080 - DNA, 404 bp, Lilium asiatic
  Clone ID: LIB3229-039-P1-K1-A4
ctcctacattacccattttgcccctctcgaaaccctaaccctaagagatgaagggcgcgaaatcgaagaccgacaccgctaaggtcaccaagaaggccgaagccaaggtggcaccgaagaggaaggcggcggagaagccgagcaaggcggccaagccggcgaagaaggggaaggccggcgttgaccccaacaaacccaagcgccccgccagtgccttcttcgtgttcatggaggagttcaggaaggagttcaaggagaagaaccccaacaacaaggccgtctctgctgtgagcaaggctgggggagacaagtggaaatcgatgtctgatgctgataaggcaccctatcaggctaaagccaacaagcgtaagactgagtacaccaagaacatggacggctacaac

SEQ ID NO: 2081 - DNA, 355 bp, Lilium asiatic
  Clone ID: LIB3229-039-P1-K1-A5
caacaaggcagctccaagaggcagtcgcccagagagaccccgggaatctgagccttctttgagggtctacgtcggtaacctgccatggcaagtggatgattcccgcttggaacaattattcagcgaacatggtaaagttatagatgcaagagttgtgtatgaccgagagagtggtcgctcccgtgggtttggatttgtaaccttggcgacaagggaagaagtggacgatgcaattgcggctcttgatggacagagtttggagggtcgggcacttcgagtgaatgttgctgaggaaagaccgcgcagatcctcattctgatccagatgaagtattgttcctgataagtgctgattt

SEQ ID NO: 2082 - DNA, 339 bp, Lilium asiatic
  Clone ID: LIB3229-039-P1-K1-A6
aaacaaggcagctgctataggcaacatcccactagagactcacacgaatctgaaccgtctttgagggaatacgtccataacctaacatgtacagctgatcgattaaccgtggtaacaatatataaaccaacatggtataagtaataaatgcatgatacatgtatgaccgagacaacgctccctaatgcacctaataatgtggaacctaggatacatggcaacaatctaacgaacaacatactggtattggtggacagagacctgaccatcgcacactatgcagtgaatgctagacaaagaaagaccgggcacatactcaaacgcttccaactgatgtat

SEQ ID NO: 2083 - DNA, 111 bp, Lilium asiatic
  Clone ID: LIB3229-039-P1-K1-A7
gcgggcttcttcagctgcgatctatctagatgaaatactggagtatatggctgcataggaaatgaaattgactgtataatgtagactctgaacaacacgaataagccgatt

SEQ ID NO: 2084 - DNA, 410 bp, Lilium asiatic
  Clone ID: LIB3229-039-P1-K1-A8
gaaggagcctcttgcaaactacaaccaggatgcttataggctgcagttgaagctgttcctctatgaagttaagcagcagcagttgctctctggtgtacgaagttacttaaaactgtactctaccatctcaactgcaaagcttgcaacatatctggaagttgatgaacccacgttgaggacaatcttgatgacatacaagcacaaaatgcattcagttgatagtgatggaaagataatatccaatgctgatgtcgacttctacattacggaagacattgtacatgtcataaaaggaaagacggagaaacaatatggtgactactttctacaccagatcttgaagtttgaagaaataatctgtgagttggacagagttagagttgaatgagcatttgttctgtggagcctac

SEQ ID NO: 2085 - DNA, 262 bp, Lilium asiatic
  Clone ID: LIB3229-039-P1-K1-A9
gcgccacgcgtccgcattaaaataacatatttttaaaaggtaaaatctaatttttaggatattagatgaattttaattactccctattatatttaactacaatcttaattaatttgtatatttttgtaaaataaaataagttaattaatttgtatgcaaatatataaaattatattttttataaatttatttaaaaattttatgctaaagtataaataatattaatgtatttataataaaaactaattttatttaatggtct

SEQ ID NO: 2086 - DNA, 337 bp, Lilium asiatic
  unsure (1)..(337): unsure at all n locations
  Clone ID: LIB3229-039-P1-K1-B1
cccacgcgtacgcccacgcgtgcgcccacgcgtncgaagggcgaagcagatggagaggtatctgagggagccggtcaatttcgaccagatgtaattgtaggtgattatggatcagaagtttgtttcatgatcgattttgctgctttgttgtgcctttattggcttttttttccctccctttgcctgaataaggaaaggggcacgccatacactttcatgcagtgcccaaatatttgatttacttatttacctttttagttatttatctttaaaatatttgaagagaatatatagctgctatatgcctgcttgaaaaatattctttttgttaccggtg

SEQ ID NO: 2087 - DNA, 445 bp, Lilium asiatic
  Clone ID: LIB3229-039-P1-K1-B11
ccggtccggaccggcccggacgacccacgcgaccgacgcgtcctgtagatggccggcggccgttctagacgatgcatgcttacctgcgggctaatgcaacttcatagctattgtattgtggataggatattgaatccattgggctggtgtgtaacatgggcatgaacgggaaaaaccatgaatgatacacggaacaaatggcctggagtgtattggaaaactgtgctgtgggggagaagtacaaaaagaacgatctgatgaagcttgtgaaaagcagagcaccctgaatgatgcatggtactcacactgtattgactgattcaacgcgatcgttgtgaggtgtgcacccactgcatgcgattcccttgccatatgcctagattatattgcgtgcccattatttccagaaacattcggggataggataaaaaatggctgttatgaa

SEQ ID NO: 2088 - DNA, 419 bp, Lilium asiatic
  Clone ID: LIB3229-039-P1-K1-B2
acgagagcttccactgatggcgacctttcaatcttcctccaccgtcaacctcgtacctgaaggcgactcctccacgacagccggcttacttcgtctccaaggaagaagacgagggcaactgcagcgaaagcgacctctgaaacattctccaccgtctgcatgcatcatcagtgagctccagaagactcaagaagatgaaccagagccgttcaaatctcttcattccgatcaaggtaagatctcatattgatttgttactgatgattgtttctttttatagatttgtttggctataaaagatctcgaagatcagcattaagaggagcatgagtgagatccttggggatctcactttgggggaaagcttggtggttcttacgggtttagattagattaagttgtgtgatcttgagagatta

SEQ ID NO: 2089 - DNA, 404 bp, Lilium asiatic
  Clone ID: LIB3229-039-P1-K1-B3
ccaccttccaacaactccacaaccaccttcaccctccaacaccggcaaaagcttcatcaaggtacatctatctactctcttgtcccctttatgtcttatttggattgttatgtgtaggattttggaaaagcttggatttgtgtggcaaaatgaggaaaggatcaaagctcaagaaggaaaagagatgttgcaagcttgatgaggatgtgctctcggatctataagtacccctccacccccattggattggagtaagaggtctcactccggcccgagtgggggagggcacattgttggccgtctttctctcggttttggaggaggcacattgggagagcatctacaagtgatctcggagtggagagttcatcatagttttttgttgtgagtctttgttgagcttt

SEQ ID NO: 2090 - DNA, 401 bp, Lilium asiatic
  Clone ID: LIB3229-039-P1-K1-B4
cccacgcgtccgccgagatcccaccctcctctcccggcggctccgatttccaaccctcatcagatacaatgaaggtcattgctgcctacctcctggctttacttggtggaaactctagcccgtcaagcaaggatatcaagcatattcttggttcaattggtgctgatgctgaagattaacggattgagtttttgcttgctgaagttaaaagcaaggatattactgaactgatggcctctggaagagagaaatttgcatctgttccatctggtggtggtggtgtggctgttgcagtgtcagcaggtggtggtggtgcaactgcccatgcagcataagctgctgtgctgaagaaggaagagaaggtggaggagaaggaagaatctgatgatgatatgggattt

SEQ ID NO: 2091 - DNA, 296 bp, Lilium asiatic
  Clone ID: LIB3229-039-P1-K1-B5
gctcctcctgtccatggcctccgccactgccagccgatggctcagacccgaggcctatccgatcttcgcggcgacgggagtcgcgataggcttctgcgccttctcgctcgttcgccacatgtgcatcaaccccgaagtcggaatcatcaaggaacacagggccgcaggtgtcttggaaaactttgctgagggggagaagtacaaagaaaactttctcaggaagtatgtgcgaggcagagcaccggagaatatgccgcctctccacacaggttttactgatccgaagggatcctttt

SEQ ID NO: 2092 - DNA, 367 bp, Lilium asiatic
  Clone ID: LIB3229-039-P1-K1-B7
cccacgcgtccgcgcagcgtatgggcatggttcagacagtggagcaattcttcttttgctatgtcgcgattgttgatgaactggaagaacttatctccaagtcacaagcttagccagagaatttttaaaggtagaaattgatttagcggttagccaatcatttacaaaagaaggaatgctgctgattaagcatatggcttcggataaaggccagtagattcagtctgttggatttgatgtaattcagttatgttgtttccaaaagattcatgcaagtacatatactttgcaagttaaacaattgtcatgtattaagtgttacttagtgttcctttttaatcttgtaattttactcaagtatttgttc

SEQ ID NO: 2093 - DNA, 405 bp, Lilium asiatic
  Clone ID: LIB3229-039-P1-K1-B9
gccgccgctcgatctaatcctcacatcgcaggattgagtttctgcttgcaaatcagccaggatggtgagggtcagtgtcctgaatgatgccctaaagagcatgtataatgccgagaaacgtggaaaacgacaagttatgatcaggccgtcttccaaggtgatcatcaagtttcttattgtcatgcagaagcatggatacattggcgagtttgaatatgttgacgatcataggtctggtaaaatagttgtcgaattaaatgggaggctgaacaagtgtggggtcatcagtcctcgctttgatgttggtgtcaaagagattgaaccctggactgccaggttgctcccatcgcgacagtttggttatattgtgctgacgacatctgcgggcatcatggaccatgagga

SEQ ID NO: 2094 - DNA, 274 bp, Lilium asiatic
  Clone ID: LIB3229-039-P1-K1-C10
gtagaagtatattgaaggtgatccgttataaaataatatgaatgatgtcgagtgcggtattgtatatgtacatgactagaacgctatacaaggatacgaggttgatcacgtataactgagagttcacgaatttgacgcttcaattcgctcgtgattctttgccacggtcaagaaatgggtctggtcctaggtcatgaggtgtttgtggtgtcatagtaagagaaggacatcaggctaggcgtttagatgtaccgtttcattcatcaagcgcggg

SEQ ID NO: 2095 - DNA, 406 bp, Lilium asiatic
  Clone ID: LIB3229-039-P1-K1-C6
acacgcgtccgctgtggagaaagtgagacttgctgggaaccaaaatgtgatggtttgtgaacgaggcaccatgtttggctacaatgatttgattgttgatccacgcaatttggagtggatcagagaagcgagttgccctgttatagctgatgttacacattcactacaacaacctgctgggaagaagctggatggtggaggtgtggcaagtggtggtcttcgtgaactgataccatgtattgcgaggacatcggtcgcagttggagtggatggaattttcatggaggtgcatgatgatcccgtgaacgctccggttgatggacctacacaatggcctttacgtcacttcgaagagctactagaagagctcatcgtgatagcaagggttagcaaggggaaacaaccc

SEQ ID NO: 2096 - DNA, 405 bp, Lilium asiatic
  Clone ID: LIB3229-039-P1-K1-C7
cggacgcgtgggtgttggtgcgacagtcctctcctttgataaggagatggtcgttggtgggagcttacgatcagatttccgagttggccgtggtacgaagatgtctgtcggtgcgaatctgaacagcagatgtacgggtcaggttactgtgaggaccagcacttcacatgtcgagattgcgctgatagcggtgatttcgctgattagggctctgcaccggagaaaggctgttgatgatatggagtgagggaaattgaagtctaattttctgagtcggaattcagtttttctgtatcggatgctctgaggtagaggttaaagtagtcgatagctgtacatgtacaataaccgtgttgacggatataacttttattaagggagggatacagtttttattttctatca

SEQ ID NO: 2097 - DNA, 305 bp, Lilium asiatic
  Clone ID: LIB3229-039-P1-K1-C8
ctgcccaaacaaaaaccagacgcataaagaaagaatcaacaaaaaacaaacaaaagaaaaggggggccgctatagaggaaccaaactaaccaacgcatgaatgcgacggacaaaccactatatatgggaacgcaaatttaaaccactgatcgtcggtttaaatcaccacgactaacaaaacccgggctggacaaaactgaatggacctagcagaaaactacccctttgggctgcgcacctaataaagaatagggctcgaaccgaacgcccttaaaaacaactacacatactgaatggtgaaagga

SEQ ID NO: 2098 - DNA, 377 bp, Lilium asiatic
  Clone ID: LIB3229-039-P1-K1-C9
cggacgcgtggggcgagtttagttcatcggctcggcgagcgtcaatggctgagattgagttgaaaacagccccagctgattttcgcttccccacaacaaatcaaacaagacactgcttcactcgctatgtggagtatcacaagtgtgtctctgtaaaaagtgaagagtctggtgattgtggaaaggttgcccaatactacagatcactctgtcccggggaatgggttgagaaatggaatgagcagagggagaatggaaactttcctggccctctctaattgatggatccattagaactctattgtttgctgttgtcgggcacataaatgccggattgaattagtttttcattggctttatatggaactgcggtttct

SEQ ID NO: 2099 - DNA, 395 bp, Lilium asiatic
  Clone ID: LIB3229-039-P1-K1-D11
tgccccgaaatcctggatgcgatcctttggttctgagatttgttgattataagatgccctagcatagctgtgctggtattggtgtatttttgttgatcaggagaaccacaatattattacagagatcttcacgtgaggctctatggccgtctccctatctggatgcttttggtgaagaggatgttgagatgtatagagggaagcccttgtatctgaacgacgaacgctattcagctctttcgtacatggttgcatttcatggtcttgaccggaattctgaagtacttgggcatacaaccatcagcctctatgggtcggttaaaataggcggatgttcattctaacttgagtcttcaactcatatatcagaatgtacagtattttcacagtgatct

SEQ ID NO: 2100 - DNA, 408 bp, Lilium asiatic
  Clone ID: LIB3229-039-P1-K1-D12
cctagagagaaaacgagagaggagagagaaactaacagatcctcactcgcagccatgtcgctcgtcgccaacgaggatttccagcacatcctccgtgtgctcaacaccaacgttgatgggaagcagaacatcatgttcgctctcacctccatcaagggtatcggccgccgatttgccaacatcgtctgcaagaaggctgatgttgacatgacaaagagggctggcgagatctcagctgcggagcttgagaatttgatgactattgtggcgaatcctcgtcagttcaagattccggattggtttttgaatagaaagaaggattacaaggatggccgctactcgcaggttgtttctaatgcgttggatatgaagctgagggatgatcttgagcgtctcaagaagataagg

SEQ ID NO: 2101 - DNA, 380 bp, Lilium asiatic
  Clone ID: LIB3229-039-P1-K1-D2
cgccgccgccgctgctcgtctccgccgttcgccgccgcatatgccaccatgggtcgcatgcacagccgcgggaaggggatctactcctccgccctcccctacaagcgcactccgcccagctggctcaagatctccgcccaagaaggtgacgagagcatttgtaagttcggaaagaaaggcctcaccccttcccagatcggagtgattctacgtgattctcacggcatcgtccaagtgaagagtgtcaccggaagcaagatactacgaatccttaaagctcacggactggccccggagattcccgaggatctgtatcacttgatcaagaaagcggaggcgatccggaagcatctggagaggaacaggaaggataatgactc

SEQ ID NO: 2102 - DNA, 411 bp, Lilium asiatic
  Clone ID: LIB3229-039-P1-K1-D3
cggacgcgtgggcggacgcgtggggtttatatgtacctgacatgcaggattatggtattatgaaaccaagtgtgtgcttaggtacagactgtttggtggaattttaagtactttaaggtgtttgtttcaaaacacttttggccttggtttgttttgtaaacatgaccaaaccatgtttattagcttatctaatgtttgggactttgtgcttgtctggtacatataaacaaaccttaccctgctggtcacattcatgcttggatgacaaagctcaagatgaagtacatccctggaaagaggtatcctgcgcatttgctacaaattagctcattcggtgtgtaccagaaaaccattcagtaatcatatccttctgcattctcgtgttctggctggtcacgatgccgcccccca

SEQ ID NO: 2103 - DNA, 402 bp, Lilium asiatic
  unsure (1)..(402): unsure at all n locations
  Clone ID: LIB3229-039-P1-K1-D6
cccacgncgnngnngaaagcaagcggtaagtcttgttgcagggcaaatagatgcctaaatcatgcgttgacatgtggtgctggtattggtgtatttttgttgatcaggagaaccacaatattattacagagatcttcacgtcaggctctctggccgtctccctatctggatgcttttggtgacaacatcgtctgcaagaaggctgatgttgacatgacaaagagggctggcgagatctcaagctctttcgtacatggttgcatctcatggtcttgaccggaattctgaagtactttggcatacaaccatcagcctctatggaggattacaaggatgggatgttcatcctaactgaggtcttcaactcatatataagaatgtacagtattttcacagtgatct

SEQ ID NO: 2104 - DNA, 392 bp, Lilium asiatic
  Clone ID: LIB3229-039-P1-K1-D8
cagactttgaaagaggttttatatgtgccgaggttatgaagttcgatgatctaaaagaactaggtagtgaagcagcagcgaaggctgctgggaagtaccggcaggaaggaaagacatatatcgttcaggatgcggacgtaatattcttcaaatttaacgtatccggtggtgggaaaaaatgattgccttagcaaagatcaaatggagttgcagtacaccaggcatttttctccaatttgttgcaactactagttagggcaccacattacagtgggcttgtacttgtctgtccgaagtcctttggctcatcaagtgcttgctccagatcggttggtgtatcacttattgtaagcaacaaatctttttccaagttgtttgacataattcttctc

SEQ ID NO: 2105 - DNA, 405 bp, Lilium asiatic
  Clone ID: LIB3229-039-P1-K1-D9
ggggaaccaggatgctcggaactctgaactcataaaccactcttgaaactgcttaacctttaggaaagcaaattagaaatatataccaacgctaggcatcttaagtcatcggtatttacaggcactcgtcatacgtacaggcatgattcgtgaacaggtgatctaatgaactcataatctgggccgacttctagagactcaggataacacacagacactgaatggttcggtacagtctcttgcctggatgatccagttctaaaggatttggctgagaaatacaagaagacggtcgcacaggttgttcttcgatggggcatccagaggaacactgttgtcataccaaagtcctcgaagatcaagagggtggaagagaattttcaagtattcgatttcaccatatca

SEQ ID NO: 2106 - DNA, 385 bp, Lilium asiatic
  Clone ID: LIB3229-039-P1-K1-E1
cccacgcgtccgggtaaatgctattcctgcaattgaagaagtgaacattttcaaagatgatgttgtcatccaatttttgaatcccaaagtgcaagcttctattgctgccaatacttgggtggtcagcggctccccccagacaaagagactccaggatatactgccttcaataatcaaccaactcggtcctgataacttggacaaccttcggaggcttgctgagcagttccagaagcaggttccgggcggtggtaccatcccggaggaggacgatgaatatgttcctgaacttgtgccagggcacacatttgacgctgctgcacaagaaaaaacttgatatgggtgctctataacaatatactatccctttggtgaggatcctatc

SEQ ID NO: 2107 - DNA, 409 bp, Lilium asiatic
  Clone ID: LIB3229-039-P1-K1-E10
ctacgccctggccagtcagataatgcccttatgacttctgatattgaagagggcacatcttccagtggtgggttgagatcaccaggagcctctgtaaaagtcgatgaaaagaacattgcttttgtgaagttctcagaaaaacacaggaagttgttaaatgcatttattcggcagaatcctggcttgcttgagaagtcgttctcgctcatgctgaaagtaccccgtttcattgagtttgacaacaaacgtgctcatttccgatcaaaagtaaagcaccaacatgatcaccatcacagtccagtaagaatttcggtgagaagagcctacattcttgaagactcgtataatcgtctgcggatgcaatcacctcaggatttgaagggaaggctaactgtccattttcaagggg

SEQ ID NO: 2108 - DNA, 414 bp, Lilium asiatic
  Clone ID: LIB3229-039-P1-K1-E12
gcggcaaggcgtccacatacggttgctgtttgtattcgaatgagaacaggctagagggcacacccttacgtgagcgggaatgatatagaatgcttgtggtgtagcgacgactaaaaggaactatgtgttgcagtgcgactcatgcaagggtgtggttatacgccagcattaagcacagttggagaaagtgcattacaaacaacatttgggtgctgatgaaacatcgaagaatccatgacggagggagctctcctataaaggaccatcctgagaggcaaatggaacacgctttgtagcaaggtaggatgacaaaatgtcgggctagccaggttcagttttagctgggaattggtggttgtcgtaatacacactggatactaaacctaaggatggtgcgtgtatgatcttggtttc

SEQ ID NO: 2109 - DNA, 416 bp, Lilium asiatic
  Clone ID: LIB3229-039-P1-K1-E4
cgctaccaaggctgctcgcaagtcggccccgacgaccggcggagtgaaaaagccccatcgctacaggcccggcacggtggcgctccgtgagatccggaagtaccagaagagcacggagcttctcatcaggaagctgccgttccagaggctggtgagggagatcgcgcaggattttaagacggatctccgtttccagagccatgccgtgctagctctccaggaggcggcggaggcttatctggtgggattgttcgaggatacaaacctgtgcgctattcatgccaagcgcgtcacaatcatgccgaaggatatccagctcgcgcggcggatccgtggcgagcgtgcctaaatgtgttacatctttctttgtttcagatgattctctgttgacttagtttctggccgtctggttggaa

SEQ ID NO: 2110 - DNA, 416 bp, Lilium asiatic
  Clone ID: LIB3229-039-P1-K1-E5
cgctaccaaggctgctcgcaagtgggccccgacgaccggcggagtgaaaaagccccatcgctacaggcccggcacggtggcgctccgtgagatccggaagtaccagaagagcacggagcttctcatcaggaagctgccgttccagaggctggtgagggagatcgcgcaggattttaagacggatctccgtttgcagagccatgccgtgctagctctccaggaagcggcggaggcttatctggtgggattgttcgaggatacaaacctgtgcgctattcatgccaagcgcgtcacaatcatgccgaaggatatccagctcgcgcggcggatccgtggcgagcgtgcctaaatgtgttacatctttctttgtttcaaatgattctctgttgacttattttctggccgtctggttggaa

SEQ ID NO: 2111 - DNA, 423 bp, Lilium asiatic
  Clone ID: LIB3229-039-P1-K1-E6
cacgtgtcacaggcaggtggcaagacagtcctgacgtttttatgagtgaaaaaccctcatagagtgcaggccctgaacggcggcgctacgcgagatcatagctttccaaaagagcacggtgattctcatcacgtggccgccgttcaacaaagctggtggagggagatcacgctggattttaagacggatctcgcgttgcagagacatgccgtgctagctctgcaggaggcggcggagggttatctggtggtagtgttcgaggatacagacctgtgcgctattcatgcgaagcgcgtcactaatcatgccgattgatatccagctcgcgcggcgaatccctgacgagcgtgcctaaatgtgttacatctttatttgtcccaaatgatactatgttgacttactttctggccaagtggttggaat

SEQ ID NO: 2112 - DNA, 397 bp, Lilium asiatic
  Clone ID: LIB3229-039-P1-K1-E7
cggacgcgtgggcggacgcgtgggtttcaagactttccatagctgagatggagaccggatccaaggctaagaggggagctggaggccgaaagggcagcagcggaccaagggccaaatcagtgacccgctccatcaaagctggcctccagttccccgtcggcaggattgggcggtacctcaagaagggccgctatgctcagcgtgttggctctggagctcctgtctaccttgctgccgtccttgagtaccttgctgctgaggttcttgaattggctggtaatgcagctcgggacaacaagaagaaccggattgtacctcggcatgtgtgcctggcggtgagaaatgatgaggagcttggaaggctgttgggtggtgttactattgctcacggtggagt

SEQ ID NO: 2113 - DNA, 397 bp, Lilium asiatic
  Clone ID: LIB3229-039-P1-K1-E8
cggacgcgtgggcgaactcatgtatttcaagactttgcatagctgagatggagaccggatccaaggctaacaggggagctggaggccgaaaggtcagcagaggaccaaggaacaaattagtgacccgcttcatcaaagctggcctgcaattaccctttggcaggattgcgcaataccttaagaagggacgctatgctcagcgtgttgcctctggacctcctgtctaccttgctgccctccttgtgtaccttgctgatgaggttcttgaattggctggtaatgcacctcgggacaacaagaagaaccggattgtacctccgcatgtgtgcctggcggtgagaaacgatgacgaacttggaaggctgttggttggtgttactattgtttacggaggagt

SEQ ID NO: 2114 - DNA, 404 bp, Lilium asiatic
  Clone ID: LIB3229-039-P1-K1-E9
aaatactgctgctcggagggacatcctcgacattgccgacatttttcgagcaaaagctgttgatgtatctgatcatacaatcacgcttcagcttactggtgatctggacaaaatggttgctttgcaaaggttgctagagccttacggtatatgcgaggtggcgagaaccggtcgggttgctctggttcgtgaatctggcgtggattctaattatctgcgagggtattccatcccaatttaacagcgtagccccatatacaccatatatctgcactcttttacccgaggtgagaattctcttaaagcttaataagcagtgcagttgagtttgggtttcaagcagttgctttcagaagaatctgtgttaggaataccagatggtgtttaatagctccctcctagca

SEQ ID NO: 2115 - DNA, 404 bp, Lilium asiatic
  Clone ID: LIB3229-039-P1-K1-F10
cccacgcgtccgtgagctatgaaaatttggaaggccgggtaaattacggagtgcttcgcggtaggatacgatatttcgtccaaaccggtgtagaagagaacgaagctgttgcgaagaactttgctcacgatgcgaataatcaatcgttcaagccctggtgacaaatattccaactcagctagaacgcggtatatgctgaactatcgtggtacgaatgacaggatcaaattatctatgtgccatcattgggaactgcctttaacaatgctatgatggacctataaaagcctgctctttaatcattgaatacgaaaagttattcttatcatctatagatgtagcttaaaatggaagtgtggagagaacacccggtataatagaattcacgaaatcatatgtctgag

SEQ ID NO: 2116 - DNA, 259 bp, Lilium asiatic
  Clone ID: LIB3229-039-P1-K1-F11
ggatgaagctgtgggcgacgaatgaagtcagggcaaagtccaagttctggtacttcctgcgtaaattgaagaaggtgaagaagagcaacgggcaagttcttgccattaatgagatttttgagaagtatccgaccaagatcaagaactatggcatctggctccggtaccagagcaggactggctaccacaacatgtacaaggagtacagggacactactctgaacggggctgtcgagcagatgtacactgagatggcatc

SEQ ID NO: 2117 - DNA, 410 bp, Lilium asiatic
  Clone ID: LIB3229-039-P1-K1-F12
gaccgcaaccgcctcaccggtcccataccagaatcccttgctaggactacttccacctacctctacctttcccacaacaacctaaccgggccgctaccaccttcctttgcttccacatctgtccaggtcattgatttctcccgcaaccgccttgccggagatgcctcgcttctgttaggcgccaagaagccactacagaatcttgatttgtcaaggaatttgttcgagttcgacctgactaaggtggtgtttccggagaatctgacgactctagatataaaccacaacaaaatctatggaagtattcccaagcagattacagaactacaggggctgtacttcctgaatgtgagctacaacaggctctgcggcgagattccgaagctcgggcggtatgatcagtactcctt

SEQ ID NO: 2118 - DNA, 407 bp, Lilium asiatic
  Clone ID: LIB3229-039-P1-K1-F2
cccacgcgtccgcagagaaccaatataacggagatgagtatgttccataagacagaaaccgatggcatacgtaactatgggcctatgtagttgagttatctgtgtttacttgtgtttgtgttcgatctatttactgaacttatctatgtatgagtcagttaagtcaccgtgtacggtctgtctaacccgccccaccctcgcggctttggggataataaaaaaaaaaaaaaaaatctatgtatgagtcagttaagtcaccgcgtacgggatttgatatattatagttgattattcgaaaagttagatttatcaaactctactttattttactttgtttaacaaaagatcctttcgctttctttccttactttctctccacggtcggcgggttttctagtccagctcta

SEQ ID NO: 2119 - DNA, 292 bp, Lilium asiatic
  Clone ID: LIB3229-039-P1-K1-F3
acgcacgacgcctgcatggaaaacaaagatcacggagatgagtatcttacataatacagcagccgtggggatatcatactaacgagctatgttgccgttttatagcggtgtacttacttgagacgatcgatacatttaaatgcacgttaggcatgtatagattgatgtagattgtccaaagtatgggttggtctaatgtgcccaaacctaacctgttgggcggtctttatatatgaaccaagcttttctgcacctgtatgctaaatcatatgtggtctcttttgatatatga

SEQ ID NO: 2120 - DNA, 406 bp, Lilium asiatic
  Clone ID: LIB3229-039-P1-K1-F4
ctgggtgttgcaagccgcccacatcgtgtggcttcacgtatgtgaatgagacgatgtggaatgcaaccccaggcatgattggcagcgatctcgactgctcgaggtggagcaacgatcaacaggcactatgcttccagtgcgactcatgcaaggctggagttctcgccagcatcaggcacagttggagaaaggtctctgtgatcaacatcgtggtactcatcatcctcgtaattatctatgttgttggatgcgctgctttcaggaacaatcggaggatcgacaatgatgagcctttcggagaagctaggatgacaaaatctcggcctagccggcttcagttttagttgggaattggtggttgatgatatacagtgtgtatactaaacgtcagtaggttgtgtgtatg

SEQ ID NO: 2121 - DNA, 387 bp, Lilium asiatic
  unsure (1)..(387): unsure at all n locations
  Clone ID: LIB3229-039-P1-K1-F5
cccacgcgtccgcttaaaggcaattctgaatcagttgaaaaattaaggaaacaaggccatgcgagaaatgctgttcatcaaagtaaaagggtgatcgctgatgacgaagaggacgagagctcagatgaagaggcgacagacatgatggttgatgagccaataacgacgaaaggaacgtctgttgaccagccgaagttgaaagaaatggtagacgaagacggttggtctgtggttaccaggaaaggtaggggtaggaggaatgagtgaaacatttgggcgattgttgtggaaggagactattgtttcggtgtaccgtcatatatattaacttagcatgtcttttaagatatttatagggatattagcttgncaaanannnnnncnnaa

SEQ ID NO: 2122 - DNA, 164 bp, Lilium asiatic
  Clone ID: LIB3229-039-P1-K1-F6
ggatgaaactgtgggcgacgaatgaagtcagggcaaagtgcaagtactggtactgggtgcgtcaattgaagaaagtgaaaaagaacaacgggcaagctattgccattaatgagatttttgaggaggatccgaccaagatcaagaactatggcatctggctacgg

SEQ ID NO: 2123 - DNA, 184 bp, Lilium asiatic
  Clone ID: LIB3229-039-P1-K1-F8
ggaaggaaaagaaggcccagtaggaggggggaaatgtttacttgtgactgcaataggttgataatagtaactagctagtttgcccttttcaagtgttgtttttacttggtctgagttagtgcttaaaccctgtcgtccatgatggatgatttagtttatcaaagtatgagtgattccctgtttt

SEQ ID NO: 2124 - DNA, 378 bp, Lilium asiatic
  Clone ID: LIB3229-039-P1-K1-F9
ctttttgacgttccgatcgtccccgtcggatccctactgcatttctgggagccctggagctcaattttgggctgatactcgaagcacatgatctggagccatgaggaagaagttggatacccgatttcccgcttctcgaataaaaaagataatgcaagcagatgaagatgtgggaaagattgcacttgctgttcctgttttagtctctaaagcattggagttgtttctgcaagacctttgtgacagaacctatgatgtcactcttcagagaggtgtaaaaaccatgagctctttgcatttaaagcagtgtgtgcatagttttaatgtctttgatttcctgccggatatagtgagcaaagttccggatatgggtactac

SEQ ID NO: 2125 - DNA, 407 bp, Lilium asiatic
  Clone ID: LIB3229-039-P1-K1-G1
cggacgcgtgggcggacgcgtgggcggacgcgtgggttcagcgtctatttcggccggcggcttgccgaggagactgggaatcgggttcgcgggtacttcttcgagcggctggtgccatcgccgacttggattttgaaggcgtgggagtacactgaggatgatattcttacgattgccgggctcgatgcggttgtcttcctcagaatacttgttttcagtatacgcatcttctccattgctgctgttgtgtgtgtatttggggtactaccgttgaattactttggacaagaaatgcgtcacagacaaattccttcagaatcattagatgtgttcaccattgcaaatgtcaaggaaggatctcaatggcttgggatccattgtcttgcattgtatattataaccttttc

SEQ ID NO: 2126 - DNA, 384 bp, Lilium asiatic
  unsure (1)..(384): unsure at all n locations
  Clone ID: LIB3229-039-P1-K1-G10
gcgcccacgcatgncggatgttgttcaagggcggacggtgtagatgaagcaaaattacatacccgtccttacggggggataagtacagtttagggaaacctcaaataaaatcaatccccgaagctttacaccgtgatgtatggaaaaatcactcctgttacaaacataatcgaggaaagagaaggtggatatttgttgtgtgagtgataacaataatgcccgctctgatggctcttatgaagattggatgaagccttaacttttttgggagagtccctcgtgccgcaccaagagaccgatctacctggtgtgtaagcgcaccatgaccaatataatttgcagggctctagtgactgactaatgtgatttatttggtgaatttat

SEQ ID NO: 2127 - DNA, 380 bp, Lilium asiatic
  Clone ID: LIB3229-039-P1-K1-G11
acggacgccggtgcacatcatgcacacggtttttgaaggaaggacggcgtggatcgagaaaaagcaaagaacggtcatgattggaggtcaagtacagctgaagcaatcgacagagaagatcaagcccagaagcatccgacggtgatctatcgagctgttacgcctataacaagcatacgtcgaggaaggagaaaggggatcttcgttcttggtgtgacttaaactactttcacctttgatgccttacatgaagattgcatgaagactcgacttcttggggagagtttatcaggtcggaggaaagcaccgatctaccttggatgttaatgatcgaagaggaacatcacttggtcgttttatctaactgactaaggtgatgc

SEQ ID NO: 2128 - DNA, 165 bp, Lilium asiatic
  Clone ID: LIB3229-039-P1-K1-G12
gtatttgtctatttacctctgtgaagctggtagaagtgagtctatggagataggagttctctgatgtatgtgaagctgttattctatcttgctggagatcgatgttcacggtatgctgtaagttttcttacccatcgtgtatgtgaatgagatgaatgatacttt

SEQ ID NO: 2129 - DNA, 308 bp, Lilium asiatic
  Clone ID: LIB3229-039-P1-K1-G3
ggaaactccgtatcgaggatgccaagaacgccacttttgcagctatcgaggaaggaattgtacctgggggtggtgccgcctatgttcatctttcgacctatgtggcagccatcaaggatagtatggatgatgcagatgagcggctaggtgctgacattatacaaaaggcgttgttggcacctgcggctttgatagcgaacaatgctggagttgagggagaagtggtggtggataagatcaaggatggggagtgggagtttggttacaatgcgatgactgatacgtatgagaatctggttgatgctggg

SEQ ID NO: 2130 - DNA, 255 bp, Lilium asiatic
  Clone ID: LIB3229-039-P1-K1-G4
cccaaagcttgaatcatgtctgggcggggtaaaggcgggaaggggctctgcaagggcgctgccaaacgccacccaaaggggctctgggacaacatactacgcgttatcacaaacccgatcatcaggctgttaccacgcggcggcgtgtaaaagagtatcagcctcatctactaagagaccacaagagtgctgaatatatttttttagaaagaaatccatcatgctttctcctacatacaggacgcacgcccgaag

SEQ ID NO: 2131 - DNA, 413 bp, Lilium asiatic
  Clone ID: LIB3229-039-P1-K1-G5
gccgacggtccagatcaagcacacggtgtagaaggaaggacggcgtggatcgagaaaaagcaaagaacggccatgattggaggtcaagtacagctgaagcaatcgacagagaagatcaagcccagaagcatccgacggtgatctatcgagctctcacgcctataagaagcagaggtcgaggaaggagaagggggatcttcgttcttggtttgtctcaaactacttccccctttgatgcctcacatgaagattgcatgaagccttgacttcttggggagagttgagcaggccggaggaaggcacggatctaccttgcatgtcagtgatcgaagaggaacatcacttgttcgtcttctctcactgactaaggtcatccacttggtgaattgagcctgagtttttttttatgtctg

SEQ ID NO: 2132 - DNA, 221 bp, Lilium asiatic
  Clone ID: LIB3229-039-P1-K1-G6
gcggccacgcgttctccacctctttcaggcacgccggcgtttttttatcgacataggatgtcttttatttttgaaaaacgaatactctttctggtttccacacaaaatatccagcccgctagcattcttctgacacatggggggcccgtatgcaggtaccaagctctcgtacccctgcatacaacggcgtacgttttttatgatgtgacctaaactacatt

SEQ ID NO: 2133 - DNA, 180 bp, Lilium asiatic
  Clone ID: LIB3229-039-P1-K1-G7
gcggccatagtgtatgcacctctgcgaagtttttaaaactaagtctatcgagataggagccatctgacttgtgataagctgatcttctatctagctgcagagcgatgtgtcaccgactgcattgagtttcaataaccatcgtgtctgctaatgatattaatgatactattgaccaaaatc

SEQ ID NO: 2134 - DNA, 153 bp, Lilium asiatic
  Clone ID: LIB3229-039-P1-K1-G8
cccacgcgtccgcccacgcgtcccggggaaaaaggctttgtgacaagcaaaattttggggaaacccttgacgggaagaacaataaccttgaaggtgaaaagcaggacaccattgattatgtgaaggggaagaatcaagaacagggaaggattt

SEQ ID NO: 2135 - DNA, 293 bp, Lilium asiatic
  Clone ID: LIB3229-039-P1-K1-G9
tccaatttcaaggtaattgtcaaattctagatccaatttcatgatgcagatctttgtcaagacactcaccggcaagaccattactctggaagttgagagctctgacactattgacaatgttaaggccaagatccaggacaaagagggcatccctccggatcagcaacgcttgatcttcgccggaaagcaacttgaggatggtcggaccctggccgactacaacatccaaaaggagtctaccctccaccttgtcctccgcctcaagggaggtatgcagatctttgtgaagaccc

SEQ ID NO: 2136 - DNA, 406 bp, Lilium asiatic
  Clone ID: LIB3229-039-P1-K1-H1
tccaggttggctcatagtctaggcttttttttgcctttggttgcttattcttgtggtcaatggcgatggcggtcaccaaggcattttcaaaattcgtaactttgaactgcaactccatgtggatgcactcaggcaattcgccgatatactttatggatataccgtcttctaggtctagcttcaatatcatagtctgattttggaacccagttccgtaatcttgtatggactgcccaaacatctgcctgagatgttgccactcataccattgttcttctttgaaaccaacgaggtagaattatttcttcttatctttcttaaacttcttccgggttagagtagagacatcatggcgtttcttatggaccttccaccaggtgagagcatgacacttaaacttaagcat

SEQ ID NO: 2137 - DNA, 157 bp, Lilium asiatic
  Clone ID: LIB3229-039-P1-K1-H10
gcggacgcgtacgggacactagagataagaagaacttagttttaatgagaactcatactgcttttgatcacataaggaacgcacaaccacaaaattattccagagggtatacaaggaagatgaaaaaaaaacggaatagtataaaaggattatgaac

SEQ ID NO: 2138 - DNA, 309 bp, Lilium asiatic
  Clone ID: LIB3229-039-P1-K1-H11
cccacgcgtccgcggcgttccaggcgtttgctatatgcctgactagctttggcacgaaatatggctgtgaatagagtctggcattgtcttcagttctgtgatgtgcgttatatggtgtggtggcgtttgatatggtatgattgtgtacaatggggggtgggtgcgttattggtgtgtgttgaatcgcacgcttgcaactgaataatatttatatggggggcccgttatataagttcactgctcccggttacacacatgcgacattgtaaatatcctgtagtgccaccaaaaaacaatttaatgggcgat

SEQ ID NO: 2139 - DNA, 412 bp, Lilium asiatic
  Clone ID: LIB3229-039-P1-K1-H12
cggacgcgtgggtggcgaaggatcatctacgtcatctgatgggaggtcggtcaaacgtccaagatgaacttctttgccgctttggctttgcggagagaccgattgctcttatgaaatttttggactcctttagtccacgttggaatataagcctgttccattatcgttcacagggcgagactggcgcaaatgtgttggttggcatccaagttccgaaggaagatatggaagaattcaggagccgagctacaaatcttggatttgagtatgttaatgagatggcgaatgaggcttttcaccttctgatgcagtgatccatgatagaatcagatttgagtatgttagtgagatggcgaatgaagcttttcaacttgtgatgcaatgatctatcataaaatcaaatgcttcaact

SEQ ID NO: 2140 - DNA, 413 bp, Lilium asiatic
  Clone ID: LIB3229-039-P1-K1-H2
gttctcagaaagcgatggcggcggaggaggaggtctacagtatgactgcgagagttggagacctagtgctgaagttgaatccagtgttcgtgagctcgtctttcaggcagggaggtctgattaatgatggattcagtcttcgcgcgagaatcggaagctacgccggccttcttcacgccctccgtgaggcccggggccgagatatcagcatctacatcgaagcatgcacccctctggccgattgcaacaaaatatttaaaaaattgggggaaactggtctgatcgtggagaacgcgggctttttctttaagaagcgaatgctcgggaatgtcatccatgaaagcatccgccagctgcagaaagatctctacgttctccgtccactgggaaaggacaacccgctttatcagcag

SEQ ID NO: 2141 - DNA, 233 bp, Lilium asiatic
  Clone ID: LIB3229-039-P1-K1-H4
ccgtactcggccgcggagtacccacgcgtacggaaaaatatgggacaaaaaataaatccacttggtttctgacttggtacaacccaaagtcatcattccttttggttcgcacaaccacaaaattattccgcgggtatacaggaagatgaaaaaatacggaattgtatcaaggattatgtacaaaaaaataagagaacgtcctcaggtttcgaaggaatagcacgtatacaaat

SEQ ID NO: 2142 - DNA, 201 bp, Lilium asiatic
  Clone ID: LIB3229-039-P1-K1-H5
gaaaaatatgggacaaaaaataaatccacttggtttctgtcttggtacaacccaaagtcatcattccttttggttcgcacaaccacaaaattattccgcgggtatacaggaagatgaaaaaatacggaattgtatcaaggattatgtacaaaaaaataagagaacgtcctcaggtttcgaaggaatagcacgtatacaaat

SEQ ID NO: 2143 - DNA, 417 bp, Lilium asiatic
  Clone ID: LIB3229-039-P1-K1-H6
acgcccacgcgtccgcggcgttccaggcgtttgctatatgcctgactagctttggcacgaaatatggctgtgaatagagtctggcattgtcttcagttctgtgatgtgtgttatatggtgtggtggtgtttgatatggcattattgcgtaaaatgggttgaggctgtgccattgtcgtgcacagggcgagactggcgcaaatgtgttggttggcatccaagttccgaatgaagatatggaacaattcaggagccgagctacaaatcttggatttgagtatgtgtaatgagatggcgaatgaggcttttcaccttctgatgcagtgatccatgatagaatcagatttgagtatgttagtgagatggcgaatgaagcttttcaccttgtgatgcaatgatctatcataaaatcaaatgc

SEQ ID NO: 2144 - DNA, 233 bp, Lilium asiatic
  Clone ID: LIB3229-039-P1-K1-H7
tccaggttggctcatagtctaggctttatcttgcctttggttgcttattcttgttttcaatggcgatggcggtcaccaaggcattttcaaaattcgtaactttgaactgcaactccatgtggatgcactcaagcaattcgccgatatactttatggatataccgtcttctacgtctaagcttaatatcatagtctgattttggaacccagttccgtaatcttgtatgggactg

SEQ ID NO: 2145 - DNA, 234 bp, Lilium asiatic
  Clone ID: LIB3229-039-P1-K1-H9
ttaaaggatccaaacttacctacccgtgcatgcgaaataataaattttttatagggggacccaaaatcaaattactgggccggggtttaaaaaacggggactggggaaaaaacggtggtaaccaacataatagccttgtagaaaaacacccttttttcaactgggggaataataaaaaagaccgcaccgatcgaccttcttaacaaatggtcaccctgaatggggaaagagaca

SEQ ID NO: 2146 - DNA, 391 bp, Lilium asiatic
  Clone ID: LIB3229-040-P1-K1-A1
cccacgcgtccgctgtcacactacctacagaccttgacagtccgagggggaatgctgtttgttcatttgtacatcctctgctgttcatgtaaattacaagttctgtagctgccagaaggactagcaagcttgggaaagggattcgtgacccaggcacgagatgaggaaacaaagatcctagtataggttctcaataaatatcgcctgtgtatgtcattgtgagttcccttcatagtgtaaagatacaagctatgaagaagcactagttcagaaactagcatatatatgaagcctataggctgtttgtatgtcttgtttatgttagtttctagctctactgctgttttgtatgatataaattatactagttaaacagaaagtcttgggagaa

SEQ ID NO: 2147 - DNA, 258 bp, Lilium asiatic
  Clone ID: LIB3229-040-P1-K1-A11
aaaggctacactcaggacctctctgagactgggaatcaatcgtttgttggaggatctcaaggccgagggggatgagagcattattgttactctggtcccccggatgggtacggtgaaggtgggaagcgtttcaatagaattagattcttgagagacatggtagttcttgcttaagttgtgttgtcgttggaataaacttattgttcgtgttttgatttcagtcaaaaaaaaaaaaaaaaaaaaaaaaaaaaaaaacat

SEQ ID NO: 2148 - DNA, 420 bp, Lilium asiatic
  Clone ID: LIB3229-040-P1-K1-A2
gttcttcctgtattaacaatatggttccacttctactgcaaaagcgaaaattacacgtccatgcacatctggccagtatgccgctccactctcgtattcttgattgtagacattgatgatctggtggcggaaaaccatgtaagacagcgcgaagaacacaactatgaaaggaagaagaattggtgtgactactgcatacacaagcccaagcaagaaatacaattgtatccgaggttcagatgatgcgaatccaatgcttccaggatccatagcttgctccctatcttggtctgttttaactaaaaatgcattctttaaatggaaaataatcaaaggtttcaatctaagaatctctgcagcaataccagcccaaccatcaaccattacataagtgatgaaaaatgttgctttcattggtat

SEQ ID NO: 2149 - DNA, 394 bp, Lilium asiatic
  Clone ID: LIB3229-040-P1-K1-A3
gtgtaaaaacaaatatctgtaaaatctctcatgggaaggtgcatcgaaatgcaagatcgtgggtaaaagaagaaccaatttttttttatactttccctgggctcttttgttattatgttaatgtatgattgtttcccatttcactgttatgtattatttattagcttaatttcattttacctccctatgttttaaccaatgttgcattttttgatttgtggtttgatttttgttcaattaaatccatgtgacttattttattatcaaataaggttaacttttgtaaaatgacttttttttcttctctggattaaaataataatttctgttctaactctcttctttgattcaaatcgtccaccaattacgattgcataaatttgttggggataaa

SEQ ID NO: 2150 - DNA, 429 bp, Lilium asiatic
  Clone ID: LIB3229-040-P1-K1-A5
cccacgcgtccgaaatgatgctaaagtgcacataaaagtctgaaaaattagtaagcaattgattaagctggtaaatgtagttattttcttcggaatttggataacgagtggattttttttaccccattagaaacttgaggaatatgaaaaagagttcgaccctctctttctttatcaaatcttataaaacctggaatgtgaagaaactgaaacttcagggcggaagaatttgataaaagataaattatttcggataattcgggttaagatgagttattccaacgtgactttctgcatatcttaaacctttatttagatatatcctagattcgcttccatcacaactaaatattctggaaatctcttcatttgaaatactcagttttcaaagttagtgaaaatttctgtgaaaatagaatttatactaag

SEQ ID NO: 2151 - DNA, 430 bp, Lilium asiatic
  Clone ID: LIB3229-040-P1-K1-A6
caaaagaagaagagacactcagcaacattaggcctcagagctaggttcaggcggtagctcctgcacagtctcgcccacctactcagccaccgctctctctgcccgcatagtcgcaatcaccgcttccaagcccgactgggctccctagtaatccctcaccatggactggaactctgtgctgccaggtcgctcaaggatggcagtcgcagtccgcacgtgactcagcaagtgcgcctcaactacgacagccggaaggtgagctgccagaccctcagaatgaccctgctcgtagccactctgtcgcgcctcctccactactacaatcagaaacacaacacatcaacaagaagagaaatacatcataatactcaaaatactacatccaaaaagaaatccagtccatatacatatacaccagctcggactacat

SEQ ID NO: 2152 - DNA, 337 bp, Lilium asiatic
  Clone ID: LIB3229-040-P1-K1-A7
ctcaaatttcaaatcccaaatcccctctttccctctgatggcgcccaaggccgagaagaagcccgcggagaagaagccggtggcggagaagcctgccgccgaggaggagaagaaagctgccccagccgagaagaagccggcggagaagaagcccaaggccgggaagaaggtcccggcctccaaggagggggagaagaagaagaagaggtcgaagaagtcggtcgagacctacaagatctacatcttcaaggtgctgaagcaggtccaccccgacatcgggatctccaacaaggccatggggatcatgaacagcttcatcaacgacctcttcgagaag

SEQ ID NO: 2153 - DNA, 269 bp, Lilium asiatic
  Clone ID: LIB3229-040-P1-K1-A8
ctcaaatttcaaattccaaattctctctttccctttgatggcacccaaggggggggggaagcccgcggagaagaagccgttggcggataaccctgcctccgaggaggtgaagaaagctgccccagccgagaagaagtcggcggagaagaagcccaaggccgtgaagaaggtcccggccttcatagtgggggagaagaagaggaataggtggaagaagtcggtctagacctactagatctacatcttcaaggtgcttatatcaggtccac

SEQ ID NO: 2154 - DNA, 361 bp, Lilium asiatic
  Clone ID: LIB3229-040-P1-K1-A9
gcgactacaatgcgctgaaggccagctacgaagctctccgagttgactacgactcgctccgggatgacaaccagtctctcgcagctgagattgaagagctgaagttgaaactagctgatgaggaggagccttcgggctcgccggagtctgatgaaaagccgtttgagctcgtcgaggaggatgaaaatccaccgctgatctacaaggacggctcatccgatagcgactcaagtggcgtactcaatgacgatgccagtcctccttaccacccggttatcccggaagcccaggcgatcttcgactcggcgacgactaatgcattcatggattcaaaaccagggaagggaattggattctttca

SEQ ID NO: 2155 - DNA, 429 bp, Lilium asiatic
  Clone ID: LIB3229-040-P1-K1-B1
caccctccaggaccgcctcctcgccaaggaacgcctcatcgaacagtacaaggcggaggcgacgatgagcgcacagggactgaggaagtgcgttgaggagagggaggtgatggcggcggagtatgctagttttgtcaagcattgtgagaagctggagagggagtgtgtttgctatgagcaggatatcgagaggttgatggagtcgtgtgatgagttggcgaaggagaatgaggagctacgggggcgtgtggaggaatcttcttctatcacagaactagtgactgaaattcaatcaatgcaaaaggaaaaggaaaccctaagaattaatcttctaagagctgaagctgaggtcaatttactatcagaagaaaatcgattgttggatgaagagaataggaggctgtcaaggaagttaaagcgagataagca

SEQ ID NO: 2156 - DNA, 417 bp, Lilium asiatic
  Clone ID: LIB3229-040-P1-K1-B10
cccacgcgtccgccgatcacaaaatggcgatcaggagctgcctcctgctgcgaggcctttaccacatcccgccgctctgcaatttcggccggcgaaccgccgccgtcccggcggcgctcgtccacatccgtctcggccgggtacgctgcgccgcctccaactccggcgatggtccccccaaggtctcagcccgcttgtccctcatgcagcagcttctccacgacgccgaggagcgctccctctccgccggctccgagcccgctcctaagatcacactcgatcgtgtcacggttagctatgcaagaagtggaggacctggtggtcagaatgtaaataaagttaacactaaggtagacatgcggtttaatgttaaacaagcaaattggctaagcgaaagaattaaggagaggatacttc

SEQ ID NO: 2157 - DNA, 424 bp, Lilium asiatic
  Clone ID: LIB3229-040-P1-K1-B12
gtcgcgccctaacaccagagagggctcgtcgggacagctctccgtgaccgtcggaccggctgtgtaagctaccctaaagatttggtggagcacaccatgtctgggatgaactcaaacccaatgccttcaccgcaagaagaggagcaagcagtcaagaaaaagtacggaggaattttacccagaaaacaaccactcatatctaaggaccacgagcgtgcctactttgattctgctgattgggctctaggaaagggagctgagaagcctaaagggcctcttgaggcacttcggccaaagttgcagccctcgcctcatcagcaagttcgttcacgccaacgatcggtctatgcttctgcagataatgaagatggaggtgcggcttcggatgatacaaacaccactgccaccactaatactgataatg

SEQ ID NO: 2158 - DNA, 423 bp, Lilium asiatic
  Clone ID: LIB3229-040-P1-K1-B3
gtgtcaaaacaaatatctgtaaaatctctcatgggaaggtgcatcgaaatgcaagatcgtgggtaaaagaagaaccaatttttttttatactttccctgggctcttttgttattatgttaatgtatgattgtttcccatttcactgttatgtattatttattagcttaatttcattttacctccctatgttttaaccaatgttgcattttttgatttgaggatggacttttgttcaattaaatccatgtgacttattttattatcaaataaggttaacttttgtaaaatgactattttttcttctctggattaaaataataatcactgttctaactctcttgtttgattcaaatcgcccaccaattaggattgcataaattgttggggataaacccactcggacagcgcggaaacactcttgt

SEQ ID NO: 2159 - DNA, 426 bp, Lilium asiatic
  Clone ID: LIB3229-040-P1-K1-B5
gggaggcgccggtgtacacgctggagcagctgatgagggcgtcggcagagatgctggggagggggagcgtggggagtacgtataaggcggtgttggataatcggttgattgtgagtgttaagaggttggatgcggcgaagctggggatgacggggaaggaggcgtttgagcggcatatggatgcggtggggcggcttcggcatcccaatttggtgccactcagggcgtactttcaggcgaaggaggaacggttgctggtgtatgattaccagcccaatggtagcctctactcgctcatacatggctcaagatcgacacgggccaaacccctccactggacatcatgcttgaagatagccgaagatgtcgcccaaggccttgcatacatccaccaagcatcccgactggttcacggcaacatcaaat

SEQ ID NO: 2160 - DNA, 424 bp, Lilium asiatic
  Clone ID: LIB3229-040-P1-K1-B6
cggacgcgtgggattctgttggtcagttgaaggagtttgaggggaagaagttagtctctgcaacgaaggagggacttaagcttgatgagagcgaggatgagaagaagaagaaggaagccctgaaagagaagtttgagggtctgtgcaaggtcatcaaggaggtgcttggtgataaggttgagaaggttgtggtttctgaccgtgtggttgattctccttgctgtttggtcacgggtgagtatggatggacggccaacatggagaggattatgaaggcccaagcgctgagggactccagcatggctggttacatgtcaagcaagaagaccatggaaatcaacccggagaactccatcatggaagagctgaggaagcgggctgatgctgacaagaacgacaagtcagtcaaggaccttgtgttgct

SEQ ID NO: 2161 - DNA, 274 bp, Lilium asiatic
  Clone ID: LIB3229-040-P1-K1-B7
ctgacgcgtgggattcttgttcatgaactgcaggagttagcggtcaaaaaggggggctctgtaatgagcgagggacttaagcttgatgagagcgaggatgataagattacaacggaagccctgaaagataactttgctgtttcttgtgcactgtcatcaaagaggggcttgtttataaaggttataacggagttgattctgaccctttgcttgattctccttgctaattggtcacttctgggtacggatggacgatcatctttgattggattat

SEQ ID NO: 2162 - DNA, 114 bp, Lilium asiatic
  Clone ID: LIB3229-040-P1-K1-B9
gcgcgcagcactagcctattcaagcttatgtaccccggtccttctatacctaggggggggtgatgaacatatgacacgactttatttccttttcgtgacagagaactattcaga

SEQ ID NO: 2163 - DNA, 190 bp, Lilium asiatic
  Clone ID: LIB3229-040-P1-K1-C1
aacgccctctttcaatcattacaactcatctttatataaactaccttaatcacctggtggaagctctacaaaaattgcatcctatatactctcatattccaataaaccttctatatttatctccactaagcttctctcaaacatactcatctccaatctaaaaatacttctgaatcttacactttaatcc

SEQ ID NO: 2164 - DNA, 423 bp, Lilium asiatic
  Clone ID: LIB3229-040-P1-K1-C11
ggacggtatggtggttatcagggtggtggcagcagttatggtggatattctggtcgttctggaagctctgggttatctggttcgaaccctgtttcccatggaaaacattatggttactaggatccccagtgattagggacagcagctgagatctttcaagtccggagcccagcctatgtgaagcctgaagcctaaaactgtagacctgatgaactggatccaagttttatatggcccaccttggaagcttaggaggagaccagcatgcaataatattatgtttttcctatgagcctttagcctttattcgtgccgaacattttttcagtatcccgagggcctgtcttccaagcccaaacatattttcagatgcttttgtattcagttggtattaaaaccgtgtatttttgggtctcttgaatc

SEQ ID NO: 2165 - DNA, 417 bp, Lilium asiatic
  Clone ID: LIB3229-040-P1-K1-C12
ggacggtatggtgggtatcagggtggtggcagcagatatggcggatattcgggtgggtctggaagctctgtgttatctggttcgaaccctgattcccatggaaaacattatggatactaggatccccagagattatggacagcagctgatatctttcaagtccggaacccagcctatgtgaagcctgaagcctaaaactggacacctgatgaactggatccaagttatatatggaccaccttggaagcttaggacgagaccagcatgcaataatattatgtttttcctatgagcctttagcccatattcgcgcctaacatttttatagtatcccgagggcctgtcttccaagcccaaacatattttcagatgctttcgtattcatttgctattaaaaccgtgtattgttgggtctct

SEQ ID NO: 2166 - DNA, 388 bp, Lilium asiatic
  Clone ID: LIB3229-040-P1-K1-C2
aaggccctctctcatgcattacaactcaactagagatgagctgctagaatcggctggtgaagtctttacaaatatcgcatccggtatactgcgggtacgagtgaaccatatatattctctctccgaagctgcacgcgttcatactgatctcgaggcgaggaaaacgactggatcggtggtgttgatccccgatagctaaaatagatatctgtggcaaggacttggggaaaaattgatgaatgtctggcttgttttcagagtaaaataagggagtaaaaatgtttgtactgtttaaactaagtgtgaaatgcctgctgtaatagtacaccagtgtatgcatctgatagtttaaattgttcgaactaaacatataaatatttgaataatc

SEQ ID NO: 2167 - DNA, 229 bp, Lilium asiatic
  Clone ID: LIB3229-040-P1-K1-C4
ctgaatcactagcgggcgttctagtggaagctcgattacacgcgcgtgaatgcgacgtggtagatctactatattgcgaccttaaagaattagagtcggcgcagacttacaacatcatgtctgtgaagaccctggcggttctcaacatctttgccttgtgccacattgtgctgttgactcatggatccatactaatcaggcgcgagcccatggtgattctcatcacctg

SEQ ID NO: 2168 - DNA, 261 bp, Lilium asiatic
  Clone ID: LIB3229-040-P1-K1-C5
ctcgcacctgaactggcgtatggactagatccatagccgcactacctgactaaacagggggagaatcacccacttgcgaccctgaaaaggtcgtatggagaaccttaggtggaaccaaatcttcgttgtagagccgccagcttgtaaacttaccgagattaaatctcaaacctgtgcataatgtacataattatttgtatgtcagcgcaggtctaattgagtaggcacccaaatgtatcttatgctatgtggaaatgaacg

SEQ ID NO: 2169 - DNA, 351 bp, Lilium asiatic
  Clone ID: LIB3229-040-P1-K1-C6
cgcggagctaaaattctttatggagatgatgcattggcgcactacctttctcaacagagtgtaaatgaaccagtgacaaccctggaaaggtcggagggagaacctgaggtggaaccagagcttccttctagagccgccagcatgtaaacttcccgagattaaatctcaaacctgtacataaggtacatatttatttgtattttattgcaggtctaattggtagcccacccaaatgtaacttatgctatggttaaatgaacgactaattggctaattgtaaacatgatagcagtgaaaaagataaaaagccttcgtcagaatagtctggaggagcaaataatgcaattcttg

SEQ ID NO: 2170 - DNA, 350 bp, Lilium asiatic
  Clone ID: LIB3229-040-P1-K1-C8
gatgaagcagacggttgctacagggcttctgagtgtgatcttttttgttggaggggccgccctgccgtcggaggtcatggcgccagcttatgttcaggaagcttgtgctgctgctggggcggtttatgaggcgtacagtgtgtgctgcgcttaccaccaagctgcttctcgtttggattttgccactcttttagcggttgctgaggttggaaggttatgtcttcagagagatttttgatgttttaatgcttacactgaaagcattacagtagtgaaataagtgggaattgagcgatgtttggacgttcagccagttgatgtatgagaatggaataagtgcgagttcttgg

SEQ ID NO: 2171 - DNA, 376 bp, Lilium asiatic
  Clone ID: LIB3229-040-P1-K1-D1
ctcacgcgtgcggcaatttcgacccggtcagtcaagccgcgtaggttgaggataactggagtcgatgatcccgaatcagtgcaacggtctgttggaggattggaagtcattgggaagcgtttagaaaagtttgcagaggatgctcgtgttccatttgagttccgagcgatcgctgctaagattggagatgtttcaccatcaatgttggattgtcaacctggtgaggcgcttgtagttaattttgcgtttcagcttcatcatatgccggatgagagtgtatcgacctgtgaaccagagggatcagctcttgagggtggtgaatggattgggaccgaagttggtgacggttgtctagcaggatgtgaacaccaataca

SEQ ID NO: 2172 - DNA, 318 bp, Lilium asiatic
  Clone ID: LIB3229-040-P1-K1-D10
cggacgcgtgggctgtgacagtatagtatgcagagaatcagttcaactttgtgttgtattttcttgtaagcaaacaagttgttacctctcaagtagaaggaaaggagcttcgggttaagactgatttccatctaacttctcatttttgtttctttgaatttcgggatcattgttaatttaagttcatgaacttccctacaaattatgtatattgtgctttttttttttgtcttttttagttgtgttttaacgtggatttgtctgtgtgaaagtataataaattactgttataatagttagcttaattggtatcaaaaa

SEQ ID NO: 2173 - DNA, 417 bp, Lilium asiatic
  Clone ID: LIB3229-040-P1-K1-D12
cggacgcgtggggattaattttggactgccggacattccgggttcgaatggtgtcaaccggcctctgcgccaagtaaaatccccagccaactatctgttacacgtacaaagttctgatggaaaccggtcaaggaaaaaataatgtttttgtttgaatagatgtcactgtttaggttgtctggcattcggtgatcttgagatttttatatatcgatcttatataattgagatgacattagagggaatagtgagggtgggaacatgattatccatccggaaacattaggagttgtaagagaggatggcattagagggaattgtgagtgtgtgaacatggttatccatctggaaacataaggagttgtgggagaggctgtagagggaatagtgagggtgtgaacatgattatccatcccg

SEQ ID NO: 2174 - DNA, 378 bp, Lilium asiatic
  Clone ID: LIB3229-040-P1-K1-D5
gcgagctagcaagcagtcggttgatcagagctcggaggccctaagatgagggcgaagtggaagaagaagcgtatgaggaggctcaagaggaagcgccgaaagatgaggcagcgatcaaagtaagtgtctttatgtgatgatggcaaccttcatcaattttgctcgcatgttctggagatcctgtgatccagtctctcctggtgtgagtgtgtggtggtactggtgtagccttttatcttgtgttatgtagggtctgttatgcacctttataaacctatctatgtggcaggaagtttgtcttttttatgttccaaccgtcttgtttgtttgatacaatgctattgaaagttatttcaattctgaatgttttgttggatt

SEQ ID NO: 2175 - DNA, 424 bp, Lilium asiatic
  Clone ID: LIB3229-040-P1-K1-D7
cgagcaggagcttcttgatgggtgtggagcccgatccttctctcccttctttcgtgttgatgaactatgacacgactttcttccttcttttgtgctgatgaactatgacaagacttgattcctttttgttgtggggtacgtaggcagtctttgggaggtgcaattgagtttcggatgttggattgtagtggaggtaggcagtctttgggaggtgtaattgagtttcggatgttggattgtagtggaggtgactagagggtaatgttataggtgatgtgagagaaatttgtgacgctttgaaaaatttggaaggactgacgatgatcggggcatatattgtccagtctgaatagcctttggaagaactgttatagctttgtaatgtattgttggatcgatctgaaattttgtcaggatgtcaagg

SEQ ID NO: 2176 - DNA, 388 bp, Lilium asiatic
  Clone ID: LIB3229-040-P1-K1-D8
cgagcaggagcttgttgatgggtgtggagcccgatccatctttaccttctttggggtggatgaactatgacacgacattgttccttcttttgtgctgatgaactatgacaagacttgattcctttatgatgaggcgtacgtaggcagtctttgggaggtgcaattgaatatccgatgttggatagtagtggaggtaggcagtatttgggaggtgtaattgattttaggatgttggaatgtagtggaggtgactagaggggcatgttataggtgaaataagagaaatttgtgacgcttttaaaaatttggacagactgactatgatcagggcataaattggacagtctgaatagcctttggaagaactgttgtcgctttggaatatatt

SEQ ID NO: 2177 - DNA, 277 bp, Lilium asiatic
  Clone ID: LIB3229-040-P1-K1-E1
ctgtggagagcaaactctcccagcaaaggtggtcagtgagcagcggaggcaggccttagggcagaaaaggtggtatgagagttaatctcccaacaaagagtgacaattgagctagatttcttcggtgactgtgtttgaagagggtgagagttgtatgtgagagtattctttctccgtgtgacagacggagagtaggcttgaactgcaattataattatctctgtaaggatgtttattgaaaatgaatgattaaatgttgcttgattgtgattttata

SEQ ID NO: 2178 - DNA, 405 bp, Lilium asiatic
  Clone ID: LIB3229-040-P1-K1-E10
ctagtaattgaacgctagcgtgcggtctagaggtgccaagattacgtacgcgggcatgcaaccggacggggtggatatgaagtcacctcatgccaataaaatgcccgtcgagaaacaacccaagggactgaaaaaagcctggggctacacagctgaggcttctggcaagacatacaacattgtcgcagatgtagtggtaacctacaggacctacctgttcagcgtgctgaacaatggcccaccctgcatggcaatatgcacccggccttgaggatcacaaacagctccatcaatgacctgtttacgcacatggcgcacgatacactcggcattgccctatacaacaagaagaacactatcttctcttgctagattgagacgttcgtccgctttgcccttcatggt

SEQ ID NO: 2179 - DNA, 59 bp, Lilium asiatic
  Clone ID: LIB3229-040-P1-K1-E11
cggacgcgtgggaaaaaaaaaaaaaaaaaaaaaaaaaaaaaaaaaaaaaaaaaaaagat

SEQ ID NO: 2180 - DNA, 401 bp, Lilium asiatic
  Clone ID: LIB3229-040-P1-K1-E12
gatgagagcaagagggctgtgcctaccgcgaaaggtcaagcactcgccgatgaatatggcatcaagttttttgaaaccagtgccaagacgaacttaaatgtggagcaagttttcttttcaatagcaagagatatcaagcaaagacttgccgaaactgataccaaagctgaggatcggactatcaagatcaacaagccagataatgcagccggtgatggcaaacctgcggagaaatcggcctgctgcggatcctaagcgactaactggtgatggtggttgaatcaattgggaactaatttgcatgttatagtcaagtggacagatgaagatattggtgcttgtaattttaatcccagtatatttttcgagtactagtgtgcctttcaattgaaatatttgct

SEQ ID NO: 2181 - DNA, 427 bp, Lilium asiatic
  Clone ID: LIB3229-040-P1-K1-E2
ctcccggcctccaaggggaaggagggggagaagaagaagaagaggtcgaagaaggcgggggagacctacaagatctacatcttcaaggtcttgaagcaggtccaccctgacattgggatctccagcaaggccatggggatcatgaacagcttcgtcaacgacctcttcgagaagatggctcaagagtctgcccgtctcgcccgctacaacaagaagaataccatcacctcccgagagattcagacctctgtccgccttgtcctccctggtgagcttgccaagcacgctgtctctgaaggcaccaaggctgtcaccaagttcaccagcgcttagtcttatggggtatttaagactgatcgagcgtctgtactttgtagctgctataaatatgtttcgatttctgatcgaaacttatgttatttcaatt

SEQ ID NO: 2182 - DNA, 431 bp, Lilium asiatic
  Clone ID: LIB3229-040-P1-K1-E3
cggacgcgtgggccaatatgtaattagaaataataattgattattgcatgtgtaattaaaataatgaggttgatgagccggattacgtgtgaatgccattatataagtaaaataaccgtggattgtatgagatatagagataattatatgtcactatattacttgatgaaatagtgtcggaattgtacccgattcgaccgtgttgcttatgtatagctgatgcaagatggatcagttcttaggtacggtgtgagatgcaaattatatgatgatgccgtgattgtacatgaaatatatgatatgataatgacatgatttaaacaaactacgtaatacgtatgattcggtggatggggatacataaaacatggaagatgagccaaattgtatagcatatgaagagatgagtgtcactagattgtaacacatgt

SEQ ID NO: 2183 - DNA, 421 bp, Lilium asiatic
  Clone ID: LIB3229-040-P1-K1-E6
cccacgcgtccgcccacgcgtccgcagaagggaaaaggctgtttcagctcgaggaacctggtgctgatctcgctcttaatacacttatattcaactcattcgtcttttgtcaggtcttcaatgaaattagctccagagaaatggagaagataaacgttttccatggtatgctgcagaactatgttttcgtgtcagtcctcaccatcaccgtcatcttccaggtcatcataattgagttccttggcgaatttgcaaatacgacaccccttacattgtcacagtggtttgtgtgtgtattgatcggattcatcagcatgcccatcgctgctgccattaagttgattcctgtgggctcccagtaaaatctattttgcctcacagaatttgtttgttagacgcttccaagcactactgacttatt

SEQ ID NO: 2184 - DNA, 423 bp, Lilium asiatic
  Clone ID: LIB3229-040-P1-K1-E7
ctcgctgcctcatcgcccttcggagccggacgcgatgaacatcgacgccgccggtcgccggccggagacggcggagcacaagcaaacagaggtaggaaacgagaatttaacaggccatattatatcaacaaccatcggaggaaagaatggtgaagccaaacagacaatcagttacatggcggagcgtgtggtgggaactggctcattcggcatcgttttccaggccaaatgcctggagacagcggaatcggtggcgataaagaaggttctgcaggacaagaggtacaagaatcgggagctgcagctgatgcgctcgatggatcatccgaacgtgatatcccttaagcactgcttcttctccacgacgagccaggatgagcttttcttgaatctggtcatggaatatgtacctgagactgtgta

SEQ ID NO: 2185 - DNA, 428 bp, Lilium asiatic
  Clone ID: LIB3229-040-P1-K1-E8
cgacctgtgaaacattctccaccgtctgcatgcatcatcagtgagctccagaagactcaagaagatgaaccagagccgttcaaatctcttcattccgatcaaggtaagatctcatattgatttgttactgatgattggttctttttatagatttgtttggctataaaagatctcgaagatcagcattaagaggagcatgagtgagatccttggggatctcactttgggggaaagcttggtggatcttacgggtttagattacattaagttgtgtgatcttgagagattaattgtaataagcgcgagttgtgagagatttttgattcgagttcacttgaaggatcgatggaatcttctctttatttctgcatgctttgtaaggttttctgaactcagcgattctcttttatcgaatgaaattgatgatt

SEQ ID NO: 2186 - DNA, 412 bp, Lilium asiatic
  unsure (1)..(412): unsure at all n locations
  Clone ID: LIB3229-040-P1-K1-F1
cggacgcgtgggatcttntacgacttcccccgccgccgcttcgcccttgaggtcatcggcaagaacggatgcctggccgagggcgttcttcaccttcccggaaatccccacgtcaagcttgactcccaggaccttctgcagatcggcgacaagaagttctacttcctcctccccacccgatccatcttcgccgacgtcaccgtttcccgacaccaccagcctctacacgacgtgcctatctccttctcgaggaagggacgtgccatgttgaattacaacggccgtggggcgtatgatgagtatgacgaggaccaggaccaggatatggatgtgccgcctgcggttggtgggccttccgggcgccttgttatgactgggaagaaggcgcggagggctgccgaggaggtggagg

SEQ ID NO: 2187 - DNA, 340 bp, Lilium asiatic
  Clone ID: LIB3229-040-P1-K1-F10
ggggagcctgtctcagatttaacaagtgttaacttcagtgagccttcgtcagtggatttggaaaagctggaaggtggtacaaagaagagcagtttaatggttgagatcggtgggttgaatttacttttgggaaagaaattctcaatgtcttggcagatgggtatcaaaggctgacttgcttggagttccctatctttgcttttgctgtttttcttaatagcttcgagatcattgctgatttcgtatctcggagttcgatgaatgttgagctgagaaaatatgtgtagcatgcgatcgtcccaatgcaatgaatattgaagtgatgtttagttgttttaaa

SEQ ID NO: 2188 - DNA, 198 bp, Lilium asiatic
  Clone ID: LIB3229-040-P1-K1-F12
gccggcgccggtttaggaaactctgagaaaatggtgttgtgggtttttggctatggatcactggtgtggaaccctggcttcgagtttgatgagaaaatagtagggtatatcaaggactacaagcgtgtgtttgatcttgcttgcatagaccacagaggcacacctgaaaatccagcaaggacctgcacattggaggcc

SEQ ID NO: 2189 - DNA, 410 bp, Lilium asiatic
  Clone ID: LIB3229-040-P1-K1-F2
gtgacacttagcgggtctccgcattaccaaatccaccactataacctgttcaaaattgggaaagccggttctttgggctacaaactgctatactgccccagtgtagccggcgtccctgccgatggtccttgccgtaatctgggcatatacttggagaatgggaacaggtggttggttctgagcgaccagccgttcttcgttgtctttgtcaaagaacaaaccctcaccagtggtttacgtacttgtgcctggagtcccatgaaataagggttttatgtccgagtgcctgctatctgttgcggtacgagaagcgtcatcaaaataagggctttacgtctgcgtagggcttgatgtccgagtgtctgttgtgtgcttcggtgccaggagcgtcatgaaataaggactttatg

SEQ ID NO: 2190 - DNA, 112 bp, Lilium asiatic
  Clone ID: LIB3229-040-P1-K1-F3
gtgacacatcgcgagctgccgctctagcggatccaagcttacatccgcgtgcatgcggggaaatacgtcttgtatagcgtcacctatattgaattcactagccagaccagtg

SEQ ID NO: 2191 - DNA, 96 bp, Lilium asiatic
  Clone ID: LIB3229-040-P1-K1-F5
cccacgcgtccgcccacgcgtccgcccacgcgtccgaaaaaaaaaaaaaaaaaaaggaggggaaaaaaaaaaaaaaaaaaaaaaaaaaaataaaaa

SEQ ID NO: 2192 - DNA, 428 bp, Lilium asiatic
  Clone ID: LIB3229-040-P1-K1-F6
cggacgcgtgggtgaaaatgggagtgatgactctatgggtgttgagatgagtgagggtggtcataatgatgtaaagaatataacagattctaatggtggaaaggaggtgaaaagtgctgactctgaaattgagaaatgtgatgatgccaagactttcgagaagaaacctgagaaaagggctggtaaaaaggctaggaagaacggtgatgctagtgatgactgcgaaggcaaagcatcaaacaagggagttgctaacaacacagagggaaaccttgtggttagtgtcagagtaactagatctggtgctacacctgaagcgaaaaaaactaggaattgcaagaagggtggaagttcccgtgaagttgctgatgtttctcgaaggggcaaacttctgatgcaagcagatgatgatgatgatttccagtgat

SEQ ID NO: 2193 - DNA, 427 bp, Lilium asiatic
  Clone ID: LIB3229-040-P1-K1-F7
cggacgcgtgggcggacgcgtgggctcccgtcgacgagataaacagagtttagggtttctcgcttgaactaagatgggtcgtggagttagcagtggaggagggcaaagctccctggactacctttttggtggtggagaggctcccacaaagcccgctgctaaccctccagctgctgacaatgctgggactgttgaaaagccctccggtgctccagctccacttgacaacggcaagcaggttcctgctggcatacaaggaaacactgcaaggaacgcaaacaactacttcagagctgatggccagaatactggcaacttcctaacggatcgtccttccaccaaggttcatgctgcacctggtggtggttcctcccttggctacctttttggtggcggtagcaactgatgggatttctatgctgcttta

SEQ ID NO: 2194 - DNA, 427 bp, Lilium asiatic
  Clone ID: LIB3229-040-P1-K1-F8
ggagattataagtcgggctggcagatggataaggagtgggaggagaaggagaaggcgaggaagcggaatttggcgatgaagggcggggatgatgatgaggaaggcggtggggatgaggatgatgatgaagaccaggatgcgttgccgattgcttgctttatatgtcggcagccgtttagggatccggttgtgacgaagtgcaagcattacttttgcgagcattgtgcacttaagcatcacgacaagaacaagaaatgtttcgtgtgcaacaaaccgactctgggcctcttcaacacagctcatgagatcaagaaaaggaccaaacaggaaaagtgactggtttgaacttcacggacttttatttttctgaggttcattgtcagcacctgtcatcatctatttcaatagaacactgatggctctaatc

SEQ ID NO: 2195 - DNA, 209 bp, Lilium asiatic
  Clone ID: LIB3229-040-P1-K1-F9
atgggttcgggttgatggtgtagctcctgataagcctcttgattctgctgtcttaactcgcttaaagcaattttctgcgatgaacaagcttaagaagatggcccttaagattattgctgagagtatgtctcaagaaggaaaagagatgttgcaagcttgatgaggatatgctctcggatctataagtacccctcctcccccatcggaat

SEQ ID NO: 2196 - DNA, 101 bp, Lilium asiatic
  Clone ID: LIB3229-040-P1-K1-G1
gagaatcactgactagggatttgttgggtgcttggagtttttacttgcactgtatagggttgagactaaccttgattagccttctaggggtttatagaact

SEQ ID NO: 2197 - DNA, 423 bp, Lilium asiatic
  Clone ID: LIB3229-040-P1-K1-G10
gagggctcacaaggattagatcaaaaaagcatgagttgctgtttgcagaaattgagttcagtcagaaaagggaggtggagcttcaaagtgacaacatgtacctgagagctaagatagcggagaatgagcgaactcaagcagctatcgtgcaagcaagggctgagttcgatgcgcttccaacatttgattccagaaacttctaccaggtcaacaacatgctggaggctccaccccactatcatcatcaggatcagacagcccttcatcttggctacgaagccaaagacgattcagttccatgaaagctaagagggtgtactggtcatattaattccacttaagcttgtgttgtaccttttgaaatgtttgtctgaaccctgtgtgattactaccattcctgatgtcattaggcatcttcatatg

SEQ ID NO: 2198 - DNA, 396 bp, Lilium asiatic
  Clone ID: LIB3229-040-P1-K1-G12
ccacgcgtccggaagcagtttatggcatacatgaagcggtatgtcaagcagttgacgcctaaacttgatgccgagcagcaggtgctatttaagaagcacattgagggggccattaagtttctgcttccgaagctcagtgatctgcaattttttgtgggtgagagcatgcaggatgacagtagccttgtgtttgcttattacaaggaaggtgctactgatccaacctttttgtacttcgcgtacggattgaaggagatcaagtgctagacttgaaaaatggcagcatatgggaaaaatagtttagtttactagtttgcttgttgtgctctatggatgttgtgatattatgcttggtttttatccggtactgtgtactggatcaataagaactttttt

SEQ ID NO: 2199 - DNA, 426 bp, Lilium asiatic
  Clone ID: LIB3229-040-P1-K1-G4
cgccgccgccgcagctagccgggccgctgagtgaagatggtgaagggcaggcaaggcgaacgcgtcagattgtatgttcgcggcacgattctcggctacaagagatcgaagtcgaatcagtacgagaacacctcgctgatgcagattgagggggtgaatacgaaggaggaggttgcgtggtactgcgggaagaggctggcgtacatctacagggcgaaggtgaagaagaacggatcgcattatcggtgcatttgggggaaggttgctcgtcctcatgggaacagtggggttgtcagggccaagtttaagtcgaacctgccaccgaaagcaatgggttcgaaggttagggtgtttatgtatccaagcaacatttgaggatgcatggaacaattgaatctgggtgaagttcatttgtcgtctgttttt

SEQ ID NO: 2200 - DNA, 170 bp, Lilium asiatic
  Clone ID: LIB3229-040-P1-K1-G5
cgccgccgacgcaaatagccgagccaaaaaaagaaaaaggagaagggcaagcaaggggggggcgacagaaaagaggggggcggcacgaaataaaccaacaacaacatcgaagtcaaaacagcacggaaacaccacactcgcagcaacatagaggggaagaaaacgaagag

SEQ ID NO: 2201 - DNA, 136 bp, Lilium asiatic
  Clone ID: LIB3229-040-P1-K1-G6
tgcacgcctcgtgcaaaatcggggtaagggctgcatgatgcgaacttcgcagctggggggggctaacctgttgatgagcatgacaagctttaagtgcacacacatttccggggccatccactttttgtgtacggag

SEQ ID NO: 2202 - DNA, 287 bp, Lilium asiatic
  Clone ID: LIB3229-040-P1-K1-G9
cgggctcatgggtggtgctgggagttcagacacgaccgatattcatacgtgtgggggtggtgatagaacttgggtatgtattgcaattattataaggaagaaggatgagatagattggattatgttttataacagggtgggttggaagattcttgctttataaatataaattcctttgtcgattaggacgggtaaaaaggattgcgttgctacaaatagcattgtacacgatcagtttaatgagtagtaggatacaataaacgtgtgttagaaatttaaataggtgc

SEQ ID NO: 2203 - DNA, 82 bp, Lilium asiatic
  Clone ID: LIB3229-040-P1-K1-H1
tccactagaggatccacgctcacgtgggggggcatgcgatgttgagggtcattctatagtgactgctcaagtcaattcactg

SEQ ID NO: 2204 - DNA, 180 bp, Lilium asiatic
  Clone ID: LIB3229-040-P1-K1-H11
tccaccacctccacgtaccggactccaattcccggcccaacccacccgtccggcatctcgacacacattttatcaaaatttaagactataacatctctcctggggcgggataattaatattatcaattctccaatataacaattcacaaatcctttcgtaacatcccactttttcaaaaa

SEQ ID NO: 2205 - DNA, 355 bp, Lilium asiatic
  Clone ID: LIB3229-040-P1-K1-H12
cccacgcgtccgccagtgacaggagttctcttgcatatatatgactgcacagtagcactcaagaaatcaggtttaggtgcattggagcactggggtggccaagccaagaatgactgtgctatagaataatagtgtgcattataagggtatttaagtaatttaatattcttgacttgagattgtaccatagtgtacattgttaggtaataatagcaaattttgaaatgtgctagtgtagttgtgtgggtagtggtagaccctgaccctgtttgtatagactattgtcccagtagctgcagaggaagatagtgacattgtgacttatttttaacttatcaatttatgttacccttgt

SEQ ID NO: 2206 - DNA, 414 bp, Lilium asiatic
  Clone ID: LIB3229-040-P1-K1-H3
cggacgcgtgggcggacgcgtgggaaacttttttcgtgatcttgttggtggttgccatctccggccttctgattgacaacccggcgctgggggcgacatgcaaccccagggagctgagtccctgctcgggtgcgatgctgtacggggctgcaccagcagctaactgctgcagtaagctgaaggagcagcagccctgtttctgcggttacatcaaggatcgaagcctgagcgggtacgtgaactcggccaacagtaggaaagtggctgctgcatgtggactcaagaacccacattgctgatctgcatgcagttccaccctgcatggcatatgcagaacgtcgacaacccttgcgcaatatgctagtacgaaataatagccgatggtgcttccttttatgtatttatatctctttt

SEQ ID NO: 2207 - DNA, 206 bp, Lilium asiatic
  Clone ID: LIB3229-040-P1-K1-H5
gttacacatcgcgagaaacctctgtaaaggctccaagcttacatacacgagcatgcgaggtcataactattttataaattcacctaaatttaatgcactgaccgtcgcgatacaacctaattattgaataaacacatgcgatactccccttactctcctgataaaacatgccacattcgccagttgaaatactagcaagaacgccc

SEQ ID NO: 2208 - DNA, 422 bp, Lilium asiatic
  Clone ID: LIB3229-040-P1-K1-H6
gtaaagattcttgaaacatattggatagaggaggaagatgagaacatggcggctgatgttggtgaagctgtttatcagtttggagagggagaagtcccagttccttccggaggattccactttggctgaaggggtgttctgccatgggggagctgttaggtgatatgctcccagcttgtgatggtgatgtgttggggtcagtcggggagtcggcaatgccagtccaggtcctgtcagtccagtctcgagtgttggtctgtccagtctcaggtgttggtcgagtggatggtcgtggtggtctcaataatgtgggcatcattgaagacatattttgggtcttgaggttaaaattttctgggccctgttccttcctataggggttattttctttgtaggatggtggggtacagttggccggtcta

SEQ ID NO: 2209 - DNA, 419 bp, Lilium asiatic
  Clone ID: LIB3229-040-P1-K1-H7
cggacgcgtgggtttctctgttatttgtctggtggattgataaaactgcaatcggaccagacaaaatgccaattattctcatcgctcatccaaatgaaaagatccgatgaggacgcaaatacacaactttatcaatccaccagacaaataacagagaaaagtaacagaggcatcatatgcccctaagcacataaagcaaactgaacagtcaacagaaccatcatacaactcatgcccataaaagcgaagatggtcgcgcactcacctctgaaaggtgaacttattctgcaggtgggcctcatagtacaagcacactagatagtaatggacatccatcatacttatcagtaggggataattttccacctctggttgtctcctttagtccactcccaaaggacaacttgagttccatcacg

SEQ ID NO: 2210 - DNA, 335 bp, Lilium asiatic
  Clone ID: LIB3229-040-P1-K1-H8
cggacgcgtgggtttctctgttatttgtctggcggattgataaaactgcaggggggccagacaaaatgcggttaattctcatccctgattcaaatgaaaagatcctatgatgactcacattctcaattttatcaatttacctgatcaataacatagataaagttacagacgcttaatatgcccctatgaacattatgcaaacttatcagtgatcttaaccatcatacaactaatgcccataacagccaagatggttgctcactcaccttttaaaggttaacttatttttcaggtggtggttgtttttcaatcacacctaaatattaaatggacat

SEQ ID NO: 2211 - DNA, 97 bp, Lilium asiatic
  Clone ID: LIB3229-040-P1-K1-H9
cggactcatatcgcgagctgccggtttagaggctccaagcttacatacgcgggggtgcggtgttatagcttttatattttgtcctcttattataatt

SEQ ID NO: 2212 - DNA, 75 bp, Lilium asiatic
  Clone ID: LIB3229-041-P1-K1-A10
aggaacaagatttagctcttttatagtgtcacccagacttttccgagtgtcaaaacatacataaagttttacaat

SEQ ID NO: 2213 - DNA, 379 bp, Lilium asiatic
  Clone ID: LIB3229-041-P1-K1-A11
gcgcaatctgttactctaacccgccggaggtgccggcgggtgcgtcgcgggagtttcggtctttcatcgcctcctgtctgcagaaggaccctgctcgccggctcactgcgccgcagctgctgcagcacccttttatcacgcagttctcttcatcgccgtcgcacttacccaccagccacccatgatgtatggttaccatctgcttaggtgtgtaactttgttcctctctttaatttaaatgtagactttgctttcataatatatagatggtggttgtgatcatggtggtggaaattgggagtagtgtgttcatgtactatgacaaattgaattaaaatgatttttggttcatcttatgaatagatagttcgattaaaaa

SEQ ID NO: 2214 - DNA, 53 bp, Lilium asiatic
  Clone ID: LIB3229-041-P1-K1-A12
gcgtaacatgatactttaacccccccgaggtgctgcctgaaactttgcggggg

SEQ ID NO: 2215 - DNA, 287 bp, Lilium asiatic
  Clone ID: LIB3229-041-P1-K1-A2
aggaccaaaagaaggaaagaaagcccaggagagagacagacaccgccggggaaaaaaaaagaggctttagcgaagagaaaaaagaggaaaagagaaaagaacagagagcaggctaaaaaaatcaaggcggaagaacaagaaaaatccgcaaagagatggctgaaatatataagaagaagaagctgcatgggactgatgatgagagggccgaatctgaagtcaagaaaaaagcagctgctgcaaaatatcataatcataaaaagacagttaactctgtggggcacaac

SEQ ID NO: 2216 - DNA, 72 bp, Lilium asiatic
  Clone ID: LIB3229-041-P1-K1-A5
agtaacaagattcagctgaatatcattatagaacagacttttccgagtatcaaaacaaacataaagtttcac

SEQ ID NO: 2217 - DNA, 386 bp, Lilium asiatic
  Clone ID: LIB3229-041-P1-K1-A6
cccacgcgtccggtcactggcccctttaaggtcaatggtgttcctcttcgtcgtgtgaatcaagcttatgtaattggaacctcaaccaaagttgatataagtggagtcaatgttgagaaatttgatgacaagtacttcggaaaggagggcaagaagaagaacaagaaggtggagggtgagttttttgaggctgagaaagaggagaagaaaccagtttcccaagaaaagaaggatgatcaaaaggctgtggatgctgaattgattaaagccattgaggcagtcccagacctgaaaacttacttaggtgccaggttctcccttaggtcagggatgaagcctcatgagcttgtcttttagatttcaagagaattgtccctgtccctgtg

SEQ ID NO: 2218 - DNA, 295 bp, Lilium asiatic
  Clone ID: LIB3229-041-P1-K1-A7
cgaagactcgctggtggatgctcttttgaggattgctaattatgaatatgggaggacagcctaagttggttactcgcaggagcatggagttgtagtgtgcgatgaccagatgaaaaaccgagcaaggttggttgcaatcgttggatagcatgtagttgtaatggtctgaagagtggctagtagtacaccatcatggaatctgattgtatgatccaaattgtttgaatcgataggatgtttcttttgacatgacaggtggcagttaaattatattgaagagatttttttattatcc

SEQ ID NO: 2219 - DNA, 389 bp, Lilium asiatic
  Clone ID: LIB3229-041-P1-K1-A8
agttattggaccaaaggaagcatagaatgcctaggattgagtctgacaccgccaatgaaaagaaaagagtctttagtgaagagaaacatgagaaaaggagcaatgaacatagatctgcttataaatctcatggcgttagatcaggaaaattcgtcaatgagttgtctgaaatttatatgaagaagaagctgcatggtactgatgatgagaggtccgattctgatgtcaggaaaaatgctgctgctgcaaaatatcataatcataaaaagacagttaactctgtggggcacaacagtagctctgattatagtagtgatactaattctgtttatagcagtcattctgatgacagcagtgactacagtcgagagaagcatggcatgaaaaag

SEQ ID NO: 2220 - DNA, 315 bp, Lilium asiatic
  Clone ID: LIB3229-041-P1-K1-B1
cttatccagcaagggattcttatgtagaaccactcaggcctgttgcacagtatcacctaccggctcctgttccgtatggtacttatggacctcctgaggactattattacagtgctgagccccgtgagcctgtagaatatcgtgatccctatctgtaccgagtgcctgcgccctaccctgcttcattccgcgatgccggttacccctcaagcgggtcttatgctcctccgcctcagtatcgctactaagatcaggatttagcagaatcagataactctgttactttgagctttagttgtgttactttttaatttc

SEQ ID NO: 2221 - DNA, 137 bp, Lilium asiatic
  Clone ID: LIB3229-041-P1-K1-B11
gccggaccggaactgactggtcgggccacgccacgcgttcgtgcctaatcgaaagagggtatgtgatggatgatccgagcagacgtacgcttggatgggacggcatatgtcttttatagtggcacctatattcaact

SEQ ID NO: 2222 - DNA, 253 bp, Lilium asiatic
  Clone ID: LIB3229-041-P1-K1-B12
cggacgcgtgggagcgtgactacaacaggagagtacgagagattgtggagcagagttggacagcggattaattctctcggagaatattgtgcttgaactctcggtattgtcatgagccaaatggttgtaactctttaaatgtttgaattaggagttttatctgctaaagtttggtagacattgttaaatcaacccagtggaggagcatgatacatttgttgtgtatataaataaatttgaaccttttatctgc

SEQ ID NO: 2223 - DNA, 62 bp, Lilium asiatic
  Clone ID: LIB3229-041-P1-K1-B3
gttcagctgcgtacgagtgctatctggatcgagaggccacaccacagtggatgccgaacata

SEQ ID NO: 2224 - DNA, 152 bp, Lilium asiatic
  Clone ID: LIB3229-041-P1-K1-B5
gttgatgccaaatcgaaagagtttattgatgtcttcaaggaacagttctatccttggtttgcccagtatatggttatgaaaagggcaagtattgaaccaaatttccatgatttgtatatgaagttcttagacaaagttaattcgagaccact

SEQ ID NO: 2225 - DNA, 152 bp, Lilium asiatic
  Clone ID: LIB3229-041-P1-K1-B6
gttgatgccaaatcgaaagagtttattgatgtcttcaaggaacaggtctatccttggagtgcccagtatatggttatgaaaagggcaagaattgaaccaaacttccatgatttgtatatgaagatcttagacaaagctatttcgggaccact

SEQ ID NO: 2226 - DNA, 382 bp, Lilium asiatic
  Clone ID: LIB3229-041-P1-K1-C10
cccacgcgtccggaaaaaaataggagaaaatgtgccaggggcagctccgtgacgacctccgatcgccggccacggctcgcgccaggctcatcgtctccgatgccgatctatccgcggctcgagcccgcctcgccgagtccatggcggagctcgagcgggagcgggcccgtgctgcagacctccgtcgccgcctcgaggagtcctatgccgaaagggaccggcttaagaaactagctgccttcatgtccgccatcagagatcgtctcaagaataggcgcctcgagctcgagggggcagcgccgggcggcggaaccggcagttagggtttcaggtagtttagatgaaaaccctaacttgattacaagtaatttctagtgtagtg

SEQ ID NO: 2227 - DNA, 378 bp, Lilium asiatic
  Clone ID: LIB3229-041-P1-K1-C12
cggacgcgtgggcggacgcgtgggcggacgcgtgggcggacgcgtgggtttttttttttttttatcctagggaatatttcattaatcttaaaagattgccgaatatcaagtttcagtgacaccatacatttccacatgcacactcagagcaggatgtttacggaattaaagctggcattagataagaaacaccagaaagtcatagcatgaaaagccaaataacagttccatgaagacgatcagaaaagattggaggaagcaggtcccttggaaaggccaagacgaacctccattccatgatgtgaatctgctggacggaaggtttccgaatcttgcggcacattgagataatcttcgaagccaaagctgtccaattca

SEQ ID NO: 2228 - DNA, 373 bp, Lilium asiatic
  Clone ID: LIB3229-041-P1-K1-C2
ccacgcgtccgcggacgcgtggggggacgagcaaagttgttgcggtcgctagcacgaatgccaaggatctgaggaacacgctaccgtctcttatcgacaatgatgcttgtaggactgtcggacaattgatagccgagagatctaaggatgcagatgtgtttgcgatggcgtatgaactgaagagaaacgagagagtcgaagggaagcttggtattgtactcgacactattaaggagaatggtattcttttcgtagattgacgatttggttggttatcgaaggaattgaacaatgaatgtgatttagctttgtacgaagtgtccttgaattttgtaattttgtagttagtgttgatcaactctttatttatgag

SEQ ID NO: 2229 - DNA, 51 bp, Lilium asiatic
  Clone ID: LIB3229-041-P1-K1-C5
caagatcgcaagcggacggagctaaagtatttcaagtataatgtacggcgt

SEQ ID NO: 2230 - DNA, 202 bp, Lilium asiatic
  Clone ID: LIB3229-041-P1-K1-C8
cccacgcgtccgcacaggagttgctttcatagaaggtctctgatttggtatatatattagagtgttgagttttgagatattgagttcagtagggtagagcacttggtgtattgagatgttgagtttagtagggtagagctcttggtgtataaataagccaagtgatccgtatttataatgataattaagagatctcaagcgt

SEQ ID NO: 2231 - DNA, 379 bp, Lilium asiatic
  Clone ID: LIB3229-041-P1-K1-D10
cccacgcgtccgatggcggtctccatgtctccgatccccttgctcgtcaagctccagtcacatgttagtcataccaacatgagggtgagggcaaaagctgcggttgccatttcaaaatgtacttcgaagatggatgttgagacaatgaaggagtttggattggcaaagcttcttcagatggccgctgaattgctcagtgacaggctgccggaggcacgagaagcagccaggaccatcatcaattcgatttatgctggattttcagttggaaacgataggaaagatgaaggggatcttgttgaagatgaagaagtctcgacaagagacacatggatggatttctgttcttccaacttgcctccaatttcagctcagtcgg

SEQ ID NO: 2232 - DNA, 378 bp, Lilium asiatic
  Clone ID: LIB3229-041-P1-K1-D12
cccacgcgtccgcgatccacacacatcttcttatgacaaaaatggtcgtggacgcggaggatacgggcctccacgcagcgatggcagagatcggaaaagataccgggacgatgaccgttctgcacctgagatgtcaaaaagaccttccgactatgaacctcgaagaactgatgattcgagagcggagaggaatcctcgttttcgagagcgtggagactctgatgatgaggatgatgataggaaacgccgtcgttagcatttatgctttagtgccttttctcttaatttgtctccttaacttgggactccaatgttgggactttgcccgtgtttcatttctgcaatttaaactcgaagatagttatagttttgttctga

SEQ ID NO: 2233 - DNA, 384 bp, Lilium asiatic
  Clone ID: LIB3229-041-P1-K1-D3
ggaagaacagggcagaggaagagatggttggtatgtcgagtagcttgcaggtgctgaagcaagagatgatgttgatgcgggaggagaagcgccggaaggctagcttttcgggaacttgccattccagtgtcttgaacagaacttagattccttggcgagagcaactgacgtaaccatcatcacaactgtacattgatgactgtcatgggagagtctgatgattttccatatgaaactaggtgaaatacatgtatctgagtacatatgactgttacaaacattgctagtaatccgagcttgatgagtaggattaatttttatctgtaaggtggggttattggataggtgctgtactggagtgtggtctttccaaatgctgctgtc

SEQ ID NO: 2234 - DNA, 379 bp, Lilium asiatic
  Clone ID: LIB3229-041-P1-K1-D4
ctctctcagcgcgcgatctcagatccccaatccccctcgtcttcagcttctccttcgtcgccggcgattgcgagccctcgctctcagatattctatatttgaattaaaagcctgcatatatgggggctgtggtagatgctcctaccattggagatgtcacaaaggataccaatgcaacctctttcagtgacaagaaggtcacggtcgtgtttgttttaggtggtcctggcagtgggaaaggcactcagtgtgcaaatattgttgaacacttcggctttacccacctaagtgctggagatcttcttcgtgcagaaatcaaatctggttctggcaatggtacaatgatacagaacatgataaaggaaggaaagatagtacc

SEQ ID NO: 2235 - DNA, 377 bp, Lilium asiatic
  Clone ID: LIB3229-041-P1-K1-D6
gcttgggaggacaaggaggcttataaggcgactctgctgaagcttggtggactcttcaggaagaactttgaggtgtttgcgagctacaagattgccaaggccagtaaactgcctgaaaagatctttgttgccgaacctaacctttgaggcttgggtcaatgttgaagtaattattggtttaacgtgggcggtttttttaccagggggttgttctggattcttttcttggagaagtgaaacaaaacagagaaatctgagtagggaactataaagcttaggtttggtgggaaagttgcttttcaaaatattgtagattgataaatatattatctttggattgcagctgtgtttgaaggtgtttgcttattcttgatttt

SEQ ID NO: 2236 - DNA, 311 bp, Lilium asiatic
  Clone ID: LIB3229-041-P1-K1-D7
ccacgcgtccgcggacgcgtgggcgctgcacagcccgataaccagaaaatcagcatggtcacccgcgagtgatggatctcgccgtcggactactttcagtttgagaataatgtgcactttttgttgtttgctttcagtttggaataatcttcactgttgttcgaatttagttccgctagtaccatggtgttgtagcagtaatatccccgtgtaatcgctggtttattttaattaagatccgttgtagcagtaatatctccgtgtaatcgcaggtttattttaatttgatcttattttcttaaaaacaaaaa

SEQ ID NO: 2237 - DNA, 377 bp, Lilium asiatic
  Clone ID: LIB3229-041-P1-K1-D8
cggacgcgtgggcatgcatatgcatgttttcttcgtgcgcatgacccatgcatcctgtgtttgcaaaggtggccatggttgtcgtgggggacgatgccatcatgctcgtatgaatgagcctacgttcgagatggatgggatacggtgcgcttgctcgatgagggagtgccatatgtctttccctggcatcggcctttgtgttgtgtaggtgtacggtgttgtgtgcaaaggtcctacatgcatatgcatgggtttcctcatacacacatcccgtgctacctttcatacccaaaggtgcctatggttgccacggagtgccacgtgctcgctcgtagggggggtgcagtgttgtattcttgcagcgttggggggtgaca

SEQ ID NO: 2238 - DNA, 385 bp, Lilium asiatic
  Clone ID: LIB3229-041-P1-K1-D9
cagggaccacgatggagggctgtgatcgacaagatgaagcaaggtgcggccgagatcaagaggagtggagcagagcaggcgcaatcgacggccgtgatcaaagcgtcgatatcgagcagcaattcgatggccaagatggaggtgcaagcagagtgcatacgatcagggagcaatcagagtggtgcaagcaagaagcaagggctatgatgaaggaaggacaagcagatcaagatgtgagcggccgtgatggagctgcaagcagagggacggccaggattgaggaaggtcaagatgatccagtgaagaatcgacggcaatgatgcaactcgaaggcctataagaagggaggaagtccgagcagtaagttggttccttcgttctcggt

SEQ ID NO: 2239 - DNA, 289 bp, Lilium asiatic
  Clone ID: LIB3229-041-P1-K1-E10
cccacgcgtccggtttgtggcttccttcgtgtgttttattaatatggtgcaatataaaactattatgtacctcaagtaagttttattttgaaattttattttgggcttaaaaaaaaaaaaaaaaaaaaaaaaaaaaaaaaaaaaaaaaaaaaaaaaaaaaaaaaaaaaaaaaaaaaaaaaaaaaaaaaaaaaaaaaaaaaaaaagggggggccgttttaaaggatccaagtttacgtacccgtgcatgcaacgtaataacttttttataggggcaccaaaattaaatta

SEQ ID NO: 2240 - DNA, 82 bp, Lilium asiatic
  Clone ID: LIB3229-041-P1-K1-E11
cggcgggcggtttagaggatccaagctaaccttcgcggcgggcgacgtgataactcttttatagtgtcaccttaattcaata

SEQ ID NO: 2241 - DNA, 381 bp, Lilium asiatic
  Clone ID: LIB3229-041-P1-K1-E12
cccacgcgtccgccgcaagctccccttccagcgcctcgtccgggagatcgcccaggacttcaaggccgatctccgcttccagagctcggctgtgtcggcgctgcaggaggcgtcggaggcttacctggtggggctgtttgaggacaccaacctgtgcgccattcacgccaagagggtgactatcatgcctaaggacatccagctcgccaggaggatccgtggggagagggcttgatgttgttcagggtttctggttatgcgattagttgttaagatgtttgatgttgttcttcatgtttagggtttgttgttcgctacttgcgaaagtttgtcttttggttcgttatcattggaggacttcggtgtattaagcagttatgg

SEQ ID NO: 2242 - DNA, 385 bp, Lilium asiatic
  Clone ID: LIB3229-041-P1-K1-E2
cggctctgccgggcggcactggagtgcgatcttcgaggcagagtgaggcgaggacggcgatgctgcgatggagtggactgcggaggatgcggctcgagctcggctgtgactgttcattagcattgcaaaggattgttggagatttttatctaagaaccaggatccatttctgaattggtgctcataatactggttattatttaactattagccaaaactctgtgcagagtcaacatggtgaggatgaaggaggagggacaatggagtctcacattgctccgctcatgttactccactgctctgggcttgtgtatgatctgggattagggttagtgccaaggagcatgtgataggaaggggagatagaaggaggtgagtggtaaaa

SEQ ID NO: 2243 - DNA, 385 bp, Lilium asiatic
  Clone ID: LIB3229-041-P1-K1-E3
ggcttccgaacctctccaacaacgcaattctgatgttggcaaagagtagggttcctgtcactgagctacgtatccgtgaatgcccacatattggcgacatttcagtcatggcattagcatcaatgcacatcgagggtggaacccatgggagtagcttgcatttactggatctttatgagtgtggtggaatcacacctcttgcgtttcgatggtttaagaagccatatttcccaaggctaagatggttaggagtgacaggtagcatgaacagggatatggtagatgctttggcgagaagccggtcattcttgagtgttgcatgccgtggagaagaactcggaacggggtactgggatacaccaaatacatggtacagaggcgatga

SEQ ID NO: 2244 - DNA, 380 bp, Lilium asiatic
  Clone ID: LIB3229-041-P1-K1-E4
caatcctgcagaagagggttggaaagatatgggtgtaggtcaactctccattaagtgtaaagaaggtgccagcaaagctacaaaagagtctaatcctaccattattattcgaaatgatgttggaaaaatcttgcttaatgctttaatatatccaggcataaaattgaatattcaaaagaaggccattgcctcaatatttcatacttcggctggcgacagtggtggtggtggaggtggagacgacactggcgacaacaacaaagctttggctcgtatgtatttactgcggttgagaactgaggaagagacggaaaaactggcaacaacaataaaagaacatgtgccgtctagttagaaattttccctggtagtcatctttt

SEQ ID NO: 2245 - DNA, 385 bp, Lilium asiatic
  Clone ID: LIB3229-041-P1-K1-E8
ccggcgagagttgcttagtttttacaagttccctggggatgacattccaatcatccggggctcagctttgtctgccttacagggcaccaatgaagagataggaaagaaggcaattcttaagctaatggatgcagttgatgaatacatacctgaccccgtacgtcagctggacaagtctttcctgatgccaatagaagacgtcttttctattcagggacgtggaactgtcgtaactggccgaattgaacaaggtgtaattaaagctggagaagatgttgagatcttagggttaatgcagggtgggcctttgaagagtactgtaactggtgtggagatgtttaaaaagatcttggatcgtggacaggctggggacaatgttggcctt

SEQ ID NO: 2246 - DNA, 308 bp, Lilium asiatic
  Clone ID: LIB3229-041-P1-K1-E9
tggactttgaggcggatcacccgtttgggtttgtgatcagagaagacactactggagtggtgttgttcacagggcatctgctgaatccatccataaccgagtaactctctgatggtatcagagttctgtaacataacgcttgacctttatggagagagtgttgtttcatctttgcagtttggcctcaatgtactagttgtattagaacatattttctgtattggttttcttgtttgcccatatgatgttctattctatgtttgggcttcagtattgcttataacacaatattctaatgtttgctaatt

SEQ ID NO: 2247 - DNA, 359 bp, Lilium asiatic
  Clone ID: LIB3229-041-P1-K1-F10
cagagcagtacctcgatgagaagaccattttccacctcaatccatctggtcgctttgtcattggcgggccacatggtgacgctggcctcaccgggcgcaagattatcatcgatacttatggtggttggggagcccacggtggtggtgcattctccggcaaggacccaaccaaggttgaccgcagcggagcttacattgtgaggcaggcagcaaagagcattgtcgtcaacggtcttgcacgtcgctgcattgtgcaggtgtcatatgcgatcggtgtgccagagcctttgtcggtgtttgttgacacttatgggaccgggaagatcccggacagggagatattgaagttcgtgaaggag

SEQ ID NO: 2248 - DNA, 379 bp, Lilium asiatic
  Clone ID: LIB3229-041-P1-K1-F11
aattgtttcatttcaactagctatgatgctacaacacattttgagtccactgtcatggatgtgctttccatgtataggcagattactggaaaggatgtggatcttaccgtggatctaagtgctgctagcgctgctgaagagtgattagtgttgcaactctctcacctgccttaaaagattttaaactggtgtagccatgtgtttctatgtttcttcgatgttttccgtttgcatcaacttatttaagagctgctatattgtgccatccagccatgttagtgcccgagatcgtgcatggctacttgcctcgatgtgtttttttttttgccgtataggttgcttcttttatcatttagtatacttggtaaggcggtaatct

SEQ ID NO: 2249 - DNA, 259 bp, Lilium asiatic
  Clone ID: LIB3229-041-P1-K1-F12
tcgaaatggttcattttaaatagttatgattctacaacacattcttagtacagggtaggggatgtattttgcatgttaaatcaaattaattgaacggatgtgtaaaatactcgtgaatgtaaaaaaccttagggctcctaaagaaaagaaaatgcagcaaatttctcacttgccttaagtggttttaaacaagaggagccttccgatcgtctgtttcatcaatggttcacgctttaatgaacttataaaagagcttgta

SEQ ID NO: 2250 - DNA, 384 bp, Lilium asiatic
  Clone ID: LIB3229-041-P1-K1-F5
ccaaaattatgttaaagagtataaaaagactggtacaaaaatgaaaaagtaacaaggatatggttaatttataaatataaatggctaaatgggatatagattatgataggaccatgacccttatatttagtcaagggaatatggaaaataattatgactcttcttaattttttaaaactttttaattagagggatgtgaataaaatcttgttttatggtaaaatatttgatattaataagatcattgcgaataagttatcatttaaaataagttaacatattagttttactatgcagatcaaccttaaattttaaaaagtttttattagaaccatatctgtgtataccacgaatactcttaattttttttattagtatactcta

SEQ ID NO: 2251 - DNA, 382 bp, Lilium asiatic
  Clone ID: LIB3229-041-P1-K1-F8
gcaagacttcactgcgctccttcgatcccatccatggcttcctcctccgcgcctgcgccgcccccgtttgtggaaaagaagggcttcctccgccgtatctttcctctgctcgtggtgacgaacgtcgtcgccggagtttacgtggtctcaagggcgtcaaagaaacagccatctgagaaggccgctcctgctccagttgtgagcagcgaagttccaattcctgaaaaagcaatatctactccagccttgaaggctcttcccccagtcccggaacacgagcagcgagagcttttcaagtggatattggaggagaagaggaaagtgaagcctaaggataaattggagaagaaaaaactggatgaagaaaaggccctcctaaaaa

SEQ ID NO: 2252 - DNA, 381 bp, Lilium asiatic
  Clone ID: LIB3229-041-P1-K1-F9
cccacgcgtccgcaatcctgctcctgctaaacaaaattcttgtcgcaataacaatatgagtgggaaccacattcagctttcttctctgtccagtgagattccatttggcgaggcaccaatttcagatggggacttaaaaaatgccagtgtattagatgggtactcgactctcggttcacaatcgtcatcaatatcattttcttcagctcatcctaatagcaaccgtgggtggcggatccatagttcaccttctaatacttgttctgttagtagattgaccagtaatctacccgatatgtgcattctgggctctgagtcaaagacaggggcattgtctacccaaggaaatgagagatatcatggttttgttggtaaggatac

SEQ ID NO: 2253 - DNA, 245 bp, Lilium asiatic
  Clone ID: LIB3229-041-P1-K1-G1
gggccgggaattaatggccggatcgacgcgtccgcggacgcgtgggaatcctgctagccaggtcatctgaccagctccatttgagtcattagtgttacccaaagccatcttctgctagtcagctcgcatcattcagcatgatattgcctgtttctataaccctgagagcttttagctatactctctgattacttgtgcaaagggtctttcattagttttctgatgtaaagcttaagtttgggttc

SEQ ID NO: 2254 - DNA, 379 bp, Lilium asiatic
  Clone ID: LIB3229-041-P1-K1-G11
gatgttgtgctgcatgctgatgccatccacagaggaggtggtcaggttattccaactgctagaagagttatttatgcctcacagttgacagcgaaacccaggctgctggaaccagtttacttggttgagatccaggctcctgagcaagctcttggaggaatttatggtgttctcaatcagaaaagggggcatgtgtttgaggagatgcagcgacctggtactcccctctacaacatcaaggcttatctgcctgtcgttgagtcatttggtttctctggtgctttgagggcagcgacatctggccaggccttcccccagtgtgtctttgatcactgggacatgctgacatctgacccactcgaggctggctctcaggcat

SEQ ID NO: 2255 - DNA, 380 bp, Lilium asiatic
  unsure (1)..(380): unsure at all n locations
  Clone ID: LIB3229-041-P1-K1-G12
gtgaggagtaagatggcgatgtgggaggaagaggagattgggaagggaggaggggttggcggncacctgacatgggtcgagtggccagggtactatgagtggtgggtgtataaggggttcgtgttacatgcttcactgaccgcacttccatgagggtgctataagagctgcgggagctgcttctggattatcggattgtatgacaaatacactaaacctcctgagctctgcaatagggagaagcggatttgcgagttctgttactaactcaaggagcggtatcatcatccagtcaatagtagatactggtgtctctagcttagccacataattctagtgatgtcggtaagatttactttcgtgaagtagtactccgttat

SEQ ID NO: 2256 - DNA, 341 bp, Lilium asiatic
  Clone ID: LIB3229-041-P1-K1-G2
aaaaaatgaaaacataaattgcatattatgtctaatcaaaatactaaatattcacacatggaaaaaaataaagttacattgccgatttaacatatgatccaatatgacagaaaaaaattacatcaaagtcaaatgaaacttcctacattttaaaataaatttaggtcttttgtcggtggaccaaaaaaaacatttgctctaccgaatatgttgctactgttggatggcactacaggatgactttcccttggtctggggaatagttctttacagaaaaacaccttgaaaacataaattgcatattatgtctaatcaaaatactaaatattcacacatggaaa

SEQ ID NO: 2257 - DNA, 381 bp, Lilium asiatic
  Clone ID: LIB3229-041-P1-K1-G4
aaaaatggtacgcggggcatggtggccgagctcgcagagcttgaacccaacaaatcccccaaggttttggaggatctagtgagattggagaaaagggttttccccaaacacgaatctctatccaaatccctccacgaagaatcaaaaaagaagaacagcggattgatttatctgaacatggtgggaggccaagaggaggaggtgatcggctacgtcatgtactcttggatctcctccttgtgcgcctccatcactaagcttgcagtgaaggacagttacagaaggcagggtcatggtgaatccttactgagagcagcaattcaaaaatgtagaagaagaaaaactcaacgtgttggccttcatgtagaccccacgagaact

SEQ ID NO: 2258 - DNA, 385 bp, Lilium asiatic
  Clone ID: LIB3229-041-P1-K1-G5
cgttccgattccgaaaagaaatataatctcacagaggctcttttgttcttgtcacatttcatgggagatatccatcagccacttcatgttggcttcacgggagacgaaggtgggaacacaattatagtacactggtacaggcgaaagagtaatttacaccatgtctgggatgacatgatcattgatactgctctgaagaagttctacaacttggatctttcagagatgataaaagacattgaggcagattttctggaagactggaatactgatgttgcatcatggggggattgtgaatttaacgagacagtttgtccgaatccttatgcttcagagagtatcagcctagcctgcaagttcgcatacaaaaatgccacgccaggca

SEQ ID NO: 2259 - DNA, 380 bp, Lilium asiatic
  Clone ID: LIB3229-041-P1-K1-G7
gggaatcagggatatggttatagtggatatggtggggcagagggctcttatggtaatcagggtggttatggtgctgttggtggtcgtggtagcggtcccacaagcaaccctcctggtagtgcaggtgaacaaggttctggttcaggttatatggggggtggctatggtgatgcgactggtagtgtgggttatccaactacttggagatcggacccttcacagggagggggttatggggccggtcaggtgagtgggcctcctggtggtccagctggttacggcagtgggtatggtggtggtcagcccaggcaggcccagtagtgtcatatcatgctggagattcctcatttctgaccttggtttgttctttcctttactgg

SEQ ID NO: 2260 - DNA, 381 bp, Lilium asiatic
  Clone ID: LIB3229-041-P1-K1-G8
aacagcactttggagatactggcatcacttcaacctaatggatgcggcccctaacccttccaaggagcaattgattgaggtggttcagaggcatttcgtgtcgcagcaattggacgagttgcaggtaatcgcggggtttgtgagagcagcgaagaggctcaagaccgtctgcaattgacagagtgagactctgctctcttagtactaacatatatgtggttggtagtatatgtaagatatctatccttgtgttggtgatagagacactagatggtcgtgtaacatagatatgtcctactaaagaccttttaattcagatactgtgcttctcatagcttaggtgcacctgggtctttgagttctttggtttccgtgaaactg

SEQ ID NO: 2261 - DNA, 384 bp, Lilium asiatic
  Clone ID: LIB3229-041-P1-K1-G9
cggcgaaggcgaactctcggcaaagatgcagatcttcgtgaaaaccctaacggggaagacgatcactctcgaggtcgagagcagcgacaccatcgacaacgttaagaccaagatccaggacaaggaagggatcccgccggaccagcagcgcctgatcttcgccggcaagcagctcgaggatggccgaaccctagcagattacaacatccagaaagagtcgacattgcatctggtgctgaggttgaggggagggatcatcgagccctcgttgatggcgcttgcgaggaagtacaatcaggagaagatgatttgcaggaagtgctatgccaggcttcatcccagggcagtgaactgccgtaagaagaagtgtggccacagcaacca

SEQ ID NO: 2262 - DNA, 132 bp, Lilium asiatic
  Clone ID: LIB3229-041-P1-K1-H11
tagatgctttcttttcttgaaccctaaaaacttagtgccagttaagggtagttggtttgtgatggatgttggtttgaacttcatgttaatattagtacttgatgggtacttgaagctttattctgctttgtt

SEQ ID NO: 2263 - DNA, 389 bp, Lilium asiatic
  unsure (1)..(389): unsure at all n locations
  Clone ID: LIB3229-041-P1-K1-H12
cccacgcgtccgcccacgcgtccgcccacgcgtccgcggcctcgacggcctccggcgcggcctcgtcgccgtcacccgcagcgcgctgaagccgctgctctccatcgtccccttctgcctcttccttttgatggacatctactggaagtacgagacccgtccgacctgcgatcaggagcacgcctgcacccccaccgagcacctccgccaccagaaatccatctgtactgcgaagactgcgtggctggatgggaagcatgtggtgttcgggcaggtggtggaggggctggatgtcgtgaaggcggcggagaaggtgggatcggccagcggggcgacctcgaagccggtcgtcattgctgactgcggncagctctgatctggtagtaaag

SEQ ID NO: 2264 - DNA, 386 bp, Lilium asiatic
  Clone ID: LIB3229-041-P1-K1-H2
gggtttcccctcttgcagtgatctcgagaagccgatcaccatgagtaagttgcagagtgatgtgttgagggaggcaatcactcaggttactgctgatgccaaggagaagaatcgcaagttcacggaaactattgagcttcagattggtttgaaaaattatgatccgcagaaagataagcggttcagtggatctgtgaaattgccccatattccgaggcctaagatgaaggtctgcatgcttggtgatgctcaacatgttgaggaggcagagaaaatcggattagactatatggatgttgaagggcttaagaagatgaacaaaaacaagaaactggtcaagaagcttgctaagaagtatcatgctttcttagcatcagaggccatta

SEQ ID NO: 2265 - DNA, 387 bp, Lilium asiatic
  Clone ID: LIB3229-041-P1-K1-H3
gtcgctcacgtgttcgcatccttcaacgataccttcattcatgtcacggatctgtccgggagagagactcttgttcgaatcactggtggtatgaaggtcaaagcagacagggatgagtcatccccttatgctgccatgcttgcagcgcaagatgtcgcacagagatgcaaggagcttgggattactgctctgcatattaagcttcgggctactggtgggaataagacaaagacccctggtcctggtgctcaatctgccctccgagcgcttgctcggtctggaatgaagattggccgcattgaggatgtcactccgatcccaactgatagcacccgccgaaagggtgggagaaggggaagaaggctgtagttttcatgacttcctact

SEQ ID NO: 2266 - DNA, 181 bp, Lilium asiatic
  Clone ID: LIB3229-041-P1-K1-H6
gcttaaacctctgctctccatcgtccccttatgcctcttcctttttttggacatctactggaagaacgagacccgtcctacctgttatcaagatcacgcctgctcccccaccgagcaccttcgtcaccagaaattcatctgtacttctaaaactgcgtggctttattaaaagcatattgtg

SEQ ID NO: 2267 - DNA, 381 bp, Lilium asiatic
  Clone ID: LIB3229-041-P1-K1-H7
cacctcaccatcaccacatgcattccctcaccatcgtcgtaaaccattatcatccatccccctcctccattttcttatttctccatttttcccatttatcttattttccaaaattccatttttccgtaaaatactcccatcatctccgtctaacttatgtttttttatatttaaaataaattattatttaaataatatatatatatatatatatatatatttcccccttcctctttatataatatttaaaaatatattttctcctatttttataattataataaatatttatataatattttaatgtaaaataattaatatatattaaaatatatgatatatattaaatataataatttttatgaataatatgtattttat

SEQ ID NO: 2268 - DNA, 67 bp, Lilium asiatic
  Clone ID: LIB3229-042-P1-K1-A4
ttttattattattgttctggtttattttaaaaaaaaaaaaaaaaaaaaaaaaagggggggggaaaaa

SEQ ID NO: 2269 - DNA, 342 bp, Lilium asiatic
  Clone ID: LIB3229-042-P1-K1-A6
cccacgcgtccgcccacgcgtccgcggacgcgtgggtacgaagccacgaggtcgccatcgctgaactgaatagcctagcgccgacacgagctgtttatcaaaaagatgggaatatatttttccgtagaaatgtcaaggcgttagtggcgtctgaacagaaacaactcgatgctgccaaagctcagttacaaaagcgcaatactgcccacagttgagcgaatctatgtaaggtacaaataaatattttgaatttctgatgtttgttaagtgaatacaaattttgcaaatattttcttgtctatttatatgacgggtggcaatattaaaacagttattagagac

SEQ ID NO: 2270 - DNA, 224 bp, Lilium asiatic
  unsure (1)..(224): unsure at all n locations
  Clone ID: LIB3229-042-P1-K1-A7
cttcaccattcccatctcccagtctggcgagctgnagcttcccactttctgcgacctcttctgagttcggatgatcaactcaagagggataatanataaaaggcatgatctgaatcaaggttgtgtgtagaggtagggcaagtatggagatgagcccgagtgttgtgcaagtgactgaatgttgtaatagattactcgtttaaattaataaatagaaattagtg

SEQ ID NO: 2271 - DNA, 105 bp, Lilium asiatic
  unsure (1)..(105): unsure at all n locations
  Clone ID: LIB3229-042-P1-K1-A9
acagaaannngccaacgcgcccgcaaaaangccancagggagaacancgaaaaggananngaaaaggagaggaagaggaangagaanccngaggccanggaggaa

SEQ ID NO: 2272 - DNA, 396 bp, Lilium asiatic
  Clone ID: LIB3229-042-P1-K1-B10
aacgacatggcagccttccttgtccccatgctcgacttcgtcccagagaagcggggctccgccgctcagcttctgcaacacccatggctcaatccaggaccgttactcagtcagccatgcttgcaaccggatcactcgagtgatggggcttccgtgaagctgaagcgggaaaccgagagagaggcaatggaagcgggagttggttacattgttattgataccaagtgcgacagtaaataaagaatgtatttttctaggtagcaactcttacttgctagggagacggaactataatgccaattagatgttttaggggtggaagagtgtaaaattgaaagatcattgggtggcgtgcctttgtttttaggtggtgtatgtgaacgggtttagatcttt

SEQ ID NO: 2273 - DNA, 425 bp, Lilium asiatic
  Clone ID: LIB3229-042-P1-K1-B12
atcaaaccccaaagccatcttggaaactactttaagaagcttctcatgcctaacgagcaggtgacagtatcatggttgcatataacaataagaaatactacatagatattgtggaaacgaaaccttcttctgcaattagtattattgagacagattgtgaagtcgattttgcacctccgcttgactataaagagcctgagcgagtgcaaccgtctgttcctccaagcaaaacgcctgtacaagctccagccgcagaacctgaaccagagccaagattcagccccttcactggatctggaaggcggttggatggaaagccgtcgaagaatcagggcccggctgtctcctcctcaggtaaatctcctcaatcggaagctaccaacggggtgaagccctctacagcatccacttctcagggcagcagt

SEQ ID NO: 2274 - DNA, 396 bp, Lilium asiatic
  Clone ID: LIB3229-042-P1-K1-B4
agagaatctccatcattaaattactaccaaaggctcatagttggcaccatagtccaaatcctcttatcaaaccattaaagagaccaaactcaaggttaaaagaaaccaaactcaaggttaaaggaaaaaataagattaaaaggtaacaaacagattctgctgtgccttgacatactcaagctgccgcactgttagagcttattggttcagccacctgctttgctttattagtttcctcgtacgatgtgactgtgactgacagggctactattgcttttaagctgttgagggagaataaagaccaatttgatcttggtattagtgatgaccaaatttgatctggttataagtgatgtacatatgccccacatggatgaattaaagcttttggagttt

SEQ ID NO: 2275 - DNA, 379 bp, Lilium asiatic
  Clone ID: LIB3229-042-P1-K1-B5
gccccgtcgagtttgagtgccccgatgacgagtacatcctcgacaaggctgaggaggagggcatcgacatcccttactcgtgccgggcggggtcgtgctcatcctgcgccgggaagttggtctccggcgagattgatcagtctgatggtaactttcttgatgatgagcagatggagggcgggtttgtgctcacttgtgtgacgtacccgaggtccgatgttacgattgagacgcacaaggaggaggagctcgctggttagggttttgatatgggttgttgatgatgggataatattactcttcttttgaatatcttgtgtaatgctttgattttaatttatgtaatattttgttgagaaatctaatgtttgcttttacg

SEQ ID NO: 2276 - DNA, 253 bp, Lilium asiatic
  Clone ID: LIB3229-042-P1-K1-B9
ctccactgacgtgccgtgggtcgcagcattacagagcgctcactgccggtgagctgacccagcagatgtggggttctaagaacatgaagtgagctgctgatccaagacatggccgttatctcactgactcgggcatgttcaggggcaagatgagcaccaaggaagtcgatgagcagatgcttaatgtgcagaacaagaattcttcctactttgtcgagtggatcccgcacaatgtcaagtgaacagtgtgcga

SEQ ID NO: 2277 - DNA, 232 bp, Lilium asiatic
  Clone ID: LIB3229-042-P1-K1-C1
caaaaaaaatagcactcaatattttaatagaagataaatattaactaaacagttagctaagcagcctcttgtatggaagggcgcacacacatatagcaacaaaacagagaaggaaaagcatcaaacttgctgatgttccaacttttaaggcatataaaagaacactgatgagaaagatttgtctgggtcctgggcttagtcctaaatagaatctaaagggagccccagggcg

SEQ ID NO: 2278 - DNA, 366 bp, Lilium asiatic
  Clone ID: LIB3229-042-P1-K1-C11
ctccactcaacaactccctttcaacccccgataggtccccgccgacaaagtcgataccaggttcgcctctcctcccttctggtctcatttgtactaattttgtttattttttttggtagagaagcaggattttgtaggaattttatggattgagggtaactattattggctgaaggcagacataggcaacacaaaggtgaattatatacagttaagatggtaataggaggtggcgttagcagctctaacagacagaggatagtcgactcaacaagcttcaaggcgactctgatggagatgttggcatagatggtgactcagtgatgaagacaactatggtagccggagcaagatgaagattgattg

SEQ ID NO: 2279 - DNA, 393 bp, Lilium asiatic
  Clone ID: LIB3229-042-P1-K1-C12
cccacgcgtccgcccacgcgttcgggcggagcctatgaagatagtcagtgcagcggcagactatgaggttgctctgtctcttagagttttggaaggatgttgtttgctccacagtgagagtgctgatttggcccataaatacaaggcagttaaggtactcacaactatcttaaccactggaggagtacttgagcaaggagcatgcctagatgctttaataccgttaatgttggagtctaaacccaaccagatggattttgaggaatgttatggcatggagaaaatcacagaccttatgaaggatgaacaggctgataaaaacatcatgttgaagtgcggggagttcctgcttctactgattggacattttagtgggagggagaatccttcctt

SEQ ID NO: 2280 - DNA, 304 bp, Lilium asiatic
  Clone ID: LIB3229-042-P1-K1-C3
cccacgcgtccgattaattgtgtcactatgaaaatgagggcattgatcaatataggtgagtgactgggtaaaggtaataccattctaggtagtaatcattctcataataaaatatgacatataccacattttcaaccttggacattaaaaatgtgtaaagagagtggtgacaactatctcaacttcttcaaatattcatcaccacacaacttcacttcttctaggtcaacttgtggatatgatttgaatatttttaggctaccttttatattttaatatgggagatctatagttctagaatgat

SEQ ID NO: 2281 - DNA, 227 bp, Lilium asiatic
  unsure (1)..(227): unsure at all n locations
  Clone ID: LIB3229-042-P1-K1-C7
gaanccnnaaagcncacgggnnggccccggagaaaccggagganccgnagcacgggancaagaaggcggnggcganccggaagcancnggagaggaacaggaaggacaaggacncaaagnnnaggccganncnngnngagagcagganncancgncnggcgcgnnacnacaagcgcaccaagaagcncggngncaccnggaaanangagncnacnaccgccagcacc

SEQ ID NO: 2282 - DNA, 374 bp, Lilium asiatic
  Clone ID: LIB3229-042-P1-K1-D2
cttgaagctgctggtattcaggttatccaaattgatgaagcggctctcagggaaggactgccacttcgcaaatctgagcattctttctacttggactggtctgtccactcattcagaatcaccaactgtggcgtgaaggacaccacccagatccatacccatatgtgctacagcaacttcaatgacatcatccattcgatcatcgacatggacgcagatgtgatcactattgagaactctcgctccgatgagaagctgctgtcggtgttccgtgagggagtcaagtatggcgctggtatcggcccgggtgtttacgacattcattcccccaggatcccgtcgaccgaggagattgctgacaggatcaacaagat

SEQ ID NO: 2283 - DNA, 211 bp, Lilium asiatic
  Clone ID: LIB3229-042-P1-K1-D3
gtcaaatgagtttgaagcttgagtgatcaaatggaatcctgatgttgctgttactcgaacacctgaggaaaataactaccgagtctctgttgcctgggattttgccacattttctataacttatggaacctgcaatttggtaacttatgtaactttatgttttaaagtttgtattataactagtaatttcagattatttatatttcaagcc

SEQ ID NO: 2284 - DNA, 348 bp, Lilium asiatic
  Clone ID: LIB3229-042-P1-K1-D5
gccttttgaggatgctacatttgctctgcaagtgggtgagattagtgacattgtggatactgacagcggagcccatatcatcctcaggactggttaaactagggtaaaatcttcagcgtctgggagcccaattcgacgtatacctatttgcatcctttggatttctgctgttgtggagtctatataattctgtgaactctttttatgtgctgactattgtggttacttgttctacattggtatggtgttttgggtaataatagctgactgttgttgcgggactttgacatttggttgcatgtatgtacttcgtctatggatgccccaaaaaaaaaatataacttatta

SEQ ID NO: 2285 - DNA, 369 bp, Lilium asiatic
  Clone ID: LIB3229-042-P1-K1-D6
cccacgcgtccgtagatttcaagactttccatagctgagatggagaccggatccaaggctgggaaaggagctggaggtcgaaagggcagcatcggaccaagggccaaatcagtgacccgctccatcaaagctggcctccagttccccgtcggcaggattgggcagtacctcaagaagggccggtatgctcagcgtgttggctctggagctcctgtctaccttgctgcgcgccttgagtaccttgctgctgaggttcttgaattggctggtaatgcagcttgggacaacaagaagaaccggattggacctcggcatgtgtgcctggcggtgagaaatgatgaggagcttggaaagctgttgggtggtgtt

SEQ ID NO: 2286 - DNA, 259 bp, Lilium asiatic
  unsure (1)..(259): unsure at all n locations
  Clone ID: LIB3229-042-P1-K1-D7
nncnngggacaagacnaganagcnngcacccccnncngacgaaacnccgcaacaagcaaccaangncagaaaaggagnnnaanaagcggaggacangancnngaananaagaaanaaagnaaagcaganggcancaaccnngaacangncaagnnnngcaaacagggaggaccngnnnggaccaaanaagaaancagcngacgagaaaaaccaaacnacnggganggagaancacggcacngnnggnnnncaacgacag

SEQ ID NO: 2287 - DNA, 321 bp, Lilium asiatic
  Clone ID: LIB3229-042-P1-K1-E10
gtcttttccgatgagatcattctcgatgacagatctgcagggtgtggctcgacggattaactgactatgtgataaaattttggttgcactggtgagtcctgctgatggtttctgctgatggtttctattggctgaagtctgcagtttagtgactatggtgatggtttcttgttgatggtttctactggctgaagtctacagtttagtcactatggagtgtaaatggtggtgatttcgatatatgagtatagtgttgttaaatgataatatctgctcccaataatgtaaatacctttgatgaattttagttctttgttcctt

SEQ ID NO: 2288 - DNA, 337 bp, Lilium asiatic
  Clone ID: LIB3229-042-P1-K1-E12
cccatcgcttgaatcatgtctgggcggggtaagggtgggaaggggctcggcaagggcggcgccaagcgccatcggaaagtgctgagggacaacatccagggcatcaccaagccggcgatcaggcggttggcacggcgcggcggcgtgaataggatcagcgggctcatctacgaggagaccagaggagtgctgaagatatttctggagaatgtgatccgtgatgcttttacctacacggagcacgcacactggaagacagtgacggctatggatgttgtgtatgctcttaagctccaggggcgtaccctgtacgggttatgaggggttgaactttttt

SEQ ID NO: 2289 - DNA, 308 bp, Lilium asiatic
  unsure (1)..(308): unsure at all n locations
  Clone ID: LIB3229-042-P1-K1-E7
cggccggaannccggncgcccagcgnccgcaaaacccangagnccaaggaggggggagaagagaggccgaagcagacngcngcggcaggcnggacangaccnagacagncnnagagaacaccacccnaccccgaaaggcagcngcaagaagagnggaggaggaccncncgaggcncngagcaaccncnggccaccccagancaggaagacganngcanngcnncaaggcccnccaanngcnacanngcccaanaannnccggaagaagaagcgggcngccaccggaaagcaaaacaanaagcangagc

SEQ ID NO: 2290 - DNA, 429 bp, Lilium asiatic
  Clone ID: LIB3229-042-P1-K1-F10
tcgatcatcaccgtcccttgaatccgcgagagcacaccatccatggcgtcctcaatggcggcgcgatccggcctccgtctcaccggagctctccgccgggccttcaccccctccaatcccctcctcgtcttcaagaaccgcttctcctccgctgcccacgatgatgcctatgagacggcgaaatgggagaagatcacgtacgccgggattgtgacctgcacgcttctttccgcctggatcctgtccaagggacacgctcactatcccgatccaccggcttatccgtatctgcacattcgcaacaaggagtttccctggggtcccgatggcttattcgaaaagaagcatgctgatcaattgaatactattgctgtgatatttggatcggtttattctctggttgagaaagatgaaaacttgagttggttt

SEQ ID NO: 2291 - DNA, 423 bp, Lilium asiatic
  Clone ID: LIB3229-042-P1-K1-F12
cccacgcgtccgaagaagaggagcacaagggtgacacattcagggaaagaggcgagcggttcaagtgttcagcaagagctaggaaagataaatctaacagaaacctctctgaatccatctgtggaaaatgatgctacacaagagaagaagaggagcaagaggaaattgacttcgtcactcactgtcaatgaagaagatcgaggtgaagtcatacagattgccgacagtcccaccattgcttcgaagaagcagcctgagaagcggtcatcagcttggctcaagtctcgctgacgtattattcaccagcttgctgagtttgaagttagtaatgactggcaacacccatcaagcaaaggttgtatttttagagagggaatgagttcccattaaaagaataacacatttccatttttaataagttag

SEQ ID NO: 2292 - DNA, 299 bp, Lilium asiatic
  Clone ID: LIB3229-042-P1-K1-F3
attaatagatttaaaatgaaccccaacttagggctcagttatggagaatgaggcctatttgttttgttgatgccctgcgcatatgtttgtatggtggttggtgaggacctattcggacaatctttgagctggctacagagcattctgtattaatgccaattgtgtctatcaatgaactctcatggattgaaaagattcaagagaaagacaaggttgaaataaagttttagaaatatttatgccaattcaacataaaaattataaattttggattgattcaaactttgtaataaaaattt

SEQ ID NO: 2293 - DNA, 372 bp, Lilium asiatic
  Clone ID: LIB3229-042-P1-K1-F8
cagggcatagcctgggccttcggcggcatgatcttcgccctcgtctactgcactggcggcatttcaggtgggcacataaaccctgcagtgacttttgggctgttcctggcgaggaaactgtcgctcaccagggcagtgttctatatggtcatgcagtgtcttggagccatctgtggcgccggtgtcgtgaagggttatcagaagacgctctacgagtctaacggtggaggtgctaatgtcgttaaccatgggtataccaagggtgacgggctgggtgctgagattatcggcacctttgtgctggtctacaccgtcttctctgctactgatgccaagaggagtgcgagggattcttcatgttccgaatctggc

SEQ ID NO: 2294 - DNA, 85 bp, Lilium asiatic
  unsure (1)..(85): unsure at all n locations
  Clone ID: LIB3229-042-P1-K1-F9
gcgagcggccgcnctagagganccaagctnacgnacgcgngcangcgacgncanagcncnncnataggggcaccnaaanncaann

SEQ ID NO: 2295 - DNA, 341 bp, Lilium asiatic
  Clone ID: LIB3229-042-P1-K1-G12
aggcgatcatggcggcgacccttcggagcttgaagatcaagactggcagctgcaggcgcgtgctcaaggagctccgctcctacgagaaggaggtcgagatggaggcctccaagacggccgacatgaaggagaagggcgccgatccttactacctcaagcaacaggagaatgttctggcagagtcgaggatgatgattcctgattgccacaagcgactggaggcttcaatcgccgacttaaaagcagcactggcagaggtgaaggattcagatatgcaaggagttggaggtggagatacatgaagtggaaagcacacttgcggaggctgaaactttgtttcc

SEQ ID NO: 2296 - DNA, 400 bp, Lilium asiatic
  unsure (1)..(400): unsure at all n locations
  Clone ID: LIB3229-042-P1-K1-G2
cccacgcgtncgattccctctcaaacccctctgatggcgccgaaatccgagaaagagcccgcggagaagaagccggtggcggagaagcccgccgccgaggaggagaagaagtcagccccggcagcggcagcggcagagaagaagccagctgagaagaagcccaaggctgtgaagaagctcccggccttcaagggcaaggagggggagaagaagaagaagaggtcgaagaagtcggtcgagacctacaagatctacatctttaaggtcttaaagcaggtccaccccgacatcgggatctccagcaaggccatggggatcatgaacagcttcatcaacgatctctttgagaagatggctcaagagtctgctcgtctcgctcgctacaacaagaagaacacca

SEQ ID NO: 2297 - DNA, 93 bp, Lilium asiatic
  unsure (1)..(93): unsure at all n locations
  Clone ID: LIB3229-042-P1-K1-G5
gnncnagancgcgggcggccgcncnagagganccaagcnnacgnacgcgngcaggcgacgganagcncncnatagngncaccnaaanncaann

SEQ ID NO: 2298 - DNA, 385 bp, Lilium asiatic
  Clone ID: LIB3229-042-P1-K1-G6
actgaagtcccgtggaaaactttatgaccaccggcctcttactctgaatgatgatgactatcaaagggtatgccagattccaaagagaaagggtgcttgttttcgggatttgcctggtgttattgttgggccaaacaatgttgttgaatttgatcccaatgttgagagggtgtacttaccatctgggaatcccttggttcctgagtatgcaatgtcctttgttgatggaaaatcacccaaaccatttggtcgactgtggtgggatgtgactgttccaacagttggtaccagagcagaacctcacaatcagattattttgcattcccttcaagattaggtacttacaaattcggagaatgctcgactacaaggtttttcggacttt

SEQ ID NO: 2299 - DNA, 379 bp, Lilium asiatic
  Clone ID: LIB3229-042-P1-K1-H1
gctttctcttctttggtaacgatgtcttcttgctgtggtggaaagtgtggctgcgggtcttcctgcaagtgtggcagtggatgcaatggatgtggtatgtatcctgacttggctgaggggagcactgcctctaccactatgatcatggggtttgctcctgccaagggggagtttgaggggtttgagatgtatgctgagaatggtggctgtggctgcaagtgtggtgataactgcaactgcaacccctgcaagtgtggcaagtgatctcttcatggagaaaaggatgtagggtttgataccctttgtttactttgttctgctgtagagctgaataatggccatgggtttatatgatgcaagtctttttgcaccatgagtg

SEQ ID NO: 2300 - DNA, 146 bp, Lilium asiatic
  unsure (1)..(146): unsure at all n locations
  Clone ID: LIB3229-042-P1-K1-H10
aaacaacanacnncnnnnngngcaaacaaacnagagccnaannaagaacgggggggggcaaacaagcgaccgaggcggacaaagngaaaagaaagcaccnnggcagcgaacacanggaccaaacnaaacnaaggggggggaaccag

SEQ ID NO: 2301 - DNA, 342 bp, Lilium asiatic
  unsure (1)..(342): unsure at all n locations
  Clone ID: LIB3229-042-P1-K1-H7
acgcccacgcgtccgcccacgcgtccgcccacgcgnccgggaaccacctgcagactccggcgaacactctggagaggagggctnggcagnggaggngacccagangaaagccaggcaacaatatgcttcatgtttaagaaggcagaatcagtgatggactccacccagccttgtgtccctccaggatttagatttcaccctactgatgaagagctcgtcggctactacctgaagaagaaggtggcatcncaaaagatcgacctcgatgtcattagagacatcgatctctatagaagggaaccatgggatttaattgagaggtgtaggattggatatgaggag

SEQ ID NO: 2302 - DNA, 336 bp, Lilium asiatic
  Clone ID: LIB3229-043-P1-K1-A10
caagcaagcgatggacaacatcacaaccagcgagatagcaggactcggcgtcggagcccttctcccctgcgccacagttgccacccccaaagtcgatgccttcatttccgcttctcaaaggaggtcaccctcttcccccttccccgtcatatgtctcgttgtctttgtttattgggttattacatcctaattacaacatgccttcatttcgtttgtgcctactgcgatcctccttgattgtcgactaattgatccgcaaaacaagagaattgtaaaaaatcttggaatttgttgtattgctagattaaaaattcttttgattacttgaattttttt

SEQ ID NO: 2303 - DNA, 408 bp, Lilium asiatic
  Clone ID: LIB3229-043-P1-K1-A11
atcgaggaggagaagatgagggctgtggttggtcgatttggattgacaggaaaagcccaggtgatgccgatgaagaacttgtctgacggccagaggagtagggtgattttcgcttggcttgcctggaggcagccgcagttgctattgcttgatgagccgactaaccatcttgacattgagactattgattcattggctgaggctttgaacgagtgggatggtgggttggtgttggtgagccatgactttcggttgattaatcaggtggcgaaagagatctgggtctgtgagaatcagactgtgactcggtgggagggtgatattatggacttcaaagagcacctgaggaagaaagctgggctatccggttgaggtatatggttatgtggctggtaactattttttatc

SEQ ID NO: 2304 - DNA, 406 bp, Lilium asiatic
  Clone ID: LIB3229-043-P1-K1-A12
gtttcctgttggcaggattgggcggtacctcaagaagggtcgatatgctcagcgtgttggttcaagagctcctgtctaccttgctgccgtccttgagtatcttgctgctgaggttcttgaattggcgggcaatgcggccagggacaataagaaaaatcgaattgtgcctcgacatgtgtgtttggcggtgagaaatgacgaggagcttgggaggttgttgggtggtgttaccattgcccatggcggagtcctccccaacatcaacccagtcttgctgccaaagaagaccggaaaggagggtacagagcccaagtcaccaaagaaagctaccaagtctcccaagaaggctttatagttagtgatttgattttggtcgcttgtatgtaatcccctagattacatgaac

SEQ ID NO: 2305 - DNA, 377 bp, Lilium asiatic
  Clone ID: LIB3229-043-P1-K1-A3
ctcgcgcggagctccagccaagctccaatggcgcgctcgagcagaccgctgctcctcctgttcttcgtcctctttcaagccgtcgccgtcctcagcgggaaaaattactacgacgtactacaagtaccgaaaggcgcctcggaggagcagatcaagcgggcttaccggaagctggcgctgaagtatcaccctgacaagaatcccgggaacgaggaggcgaacaagaagtttgccgagatcaacaatgcttacgaggcgctgtcggatcgggagaagaggagtatttatgatcggtatggagaggaggggttgaagcagcatgccggtggcgggaggggcggcggcggcgggatgaacaatcaagatatttttaacaa

SEQ ID NO: 2306 - DNA, 416 bp, Lilium asiatic
  Clone ID: LIB3229-043-P1-K1-A5
tcgcggacgcgtgggcgccgccgctctcccctcctagatcgtgtagcgcaaccgatccaccggagaagatgcagaacgaggagggacagatgatggatctctacatcccgaggaagtgttccgcgacgaacaggctcatcaccgcgaaggatcatgcggcggtccagatcaacatcgggcatttggatgagagcggggtttacaccggccagttcactaccttcgccctttgcggcttcatccgtgctcagggtgatgctgatggtgctctggaccgtctttggcagaaaaagaaagtagaagctcgccagcagtaaaaagtagctgtagggcgttttgcagaggaagatctggttttagtttcaacatatgttactttgacctctactagttactctatgctttggttattttgt

SEQ ID NO: 2307 - DNA, 421 bp, Lilium asiatic
  Clone ID: LIB3229-043-P1-K1-A6
cttcattctccaccattttttccaccaactccacaaccaccttcaccctccaacaccggcaaaagcttcatcaaggtacatctatctactctcttgtcccctttatgtcttatttggattgttatgtgtaggattttggaaaagcttggatttgtgtggcaaaatgaggaaaggatcaaagctcaagaaggaaaagagatgttgcaagcttgatgaggatgtgctctcggatctataagtacccctcctcccccattggattgaagcaagaggtctcactccggcccgagtgggggagggcacattgttggccgtctttctcttggttttggaggaggcacatcttagagaggtcttcaaagagttcttgagagtccgggatggttattctttatcatgatactcggtggagtcatataag

SEQ ID NO: 2308 - DNA, 327 bp, Lilium asiatic
  unsure (1)..(327): unsure at all n locations
  Clone ID: LIB3229-043-P1-K1-A8
ctcgcgcggagctccaaccaagctccatatggctcgctcgagcagaccgctgctccgtcggaggtgcttctccctctttaagggggtcnnccacctcagcgggaaaaattactacgacgtactacaagtaccgaaaggcgcctcggaggagcagatcaagcgggcttaccggaagctggcgctgaagtatcaccctgacaagaatcccgggaacgtggaggcgaacatgatgcttgccgagatcaacaatgcttacgaggcgctgtcggatcgggagaagaggagtctttatgatcggtatggagaggaagggttgtagcagcattc

SEQ ID NO: 2309 - DNA, 379 bp, Lilium asiatic
  unsure (1)..(379): unsure at all n locations
  Clone ID: LIB3229-043-P1-K1-A9
cgtccgctcgcgcggagctccagccaagctcctttggtttgctcgagcagaccgctactcgggcggttcttcgtcctctttgaaggggtcaccgncctcagcgggaaaaattactacgacgtactacaagtaccgaaaggcgcctctgaggagcagatcaagcgggcttaccggaagctggcgctgaagtatcaccctgacatgaatcccgggtacgaggaggcgaacaagaagtttgccgagatcaacaatgcttactaggcgctgtcggatcgggagaagaggaatatttattattcggtatggagaggaggggttgtaacatcattccgttagcggtaggtgctggcgctcgcggtatgaacattcaagatatttt

SEQ ID NO: 2310 - DNA, 274 bp, Lilium asiatic
  Clone ID: LIB3229-043-P1-K1-B11
caccaacacttggccccattttgccattcgtttacagagaaatgattcttttttgctcgtacccctacagaataatgacagtgaaagtaggagtttaggtgagagagagagagagagaggctaggtaggttgatgtgaaggtgtaaaagctgtatcctcctttttttttgtttttgtttttgtttttgtttttgacagtgtatgtaagagctgtccacaagaaaatttaacaaggggggtaaccggccttataaaaaaaaaataaaaaataaat

SEQ ID NO: 2311 - DNA, 342 bp, Lilium asiatic
  Clone ID: LIB3229-043-P1-K1-B12
cggacgcgtgggcgattccgagactccccatcgccatagcggtgctcatcttcggcatcgccctacctgccgcacaggcacaagcaccggctccagcgccgaccagcgacggcactacgatcgaccagggaatcgcatacgtgctgatgctggtggcgctggtgctgacatacctgattcatccattggatgcatcgtcgccgtacaagttgttctgatatttacattgtagtagttgttgtgaagtttgtgttagtatctggggtttggctgggttagaactctgaagcgggttcctagatgatgagaaatttattcgtggataaacaaaaaatggctaat

SEQ ID NO: 2312 - DNA, 270 bp, Lilium asiatic
  Clone ID: LIB3229-043-P1-K1-B2
ctgagcagcagcaactgcgcccaagtttgcataagcgagggctaccgtggtggcgactagcagcagcgtgcgacgccggtgcatgtgcaaccgaagatgcaactgagttcggacttctctaccactatcttgaaatggagcttgagtcatgattggctacatcatcagtactgtatctgtattatgtattatccactgtatccgtattatgtattaagaataataaggaggaggctcacgatcgtgcggaccatctcctgttgaatttaa

SEQ ID NO: 2313 - DNA, 329 bp, Lilium asiatic
  Clone ID: LIB3229-043-P1-K1-B3
agcagaaccggcagcgtttgggagcaagtgagcagcgattccagatgttcgacgatcaagacttggggttctttgctaatatgctcggcatctccatatttattttagtggtcgcttatcattatgtgatggcagatccaaaatatgagtgaaattagtacattgttcgtgataatgtgacaagaagctttgatgatttaaatgttacttaaggacacatgtttttgaagtggtatcatttcctggttatggttttgtgatagtaacggatacagatgtgaggttttgcatctaagttataaacttcgaatttttcatgtttttaaaaa

SEQ ID NO: 2314 - DNA, 420 bp, Lilium asiatic
  Clone ID: LIB3229-043-P1-K1-B4
tggttacgactccagaaatcgcccaagtcttgactcgtagaagctattttaatacatttggaggtaatcctgtctgtactgctggtgcgcatgctgtacttcgagtgcttgagaaagaaaggcttcaagaaaatgcgttggttgtggggtcctacttgaaagaaaggctcatggcccttcaagaaaaacatgatgtcattggagatgtgaggggaagaggcctgatgcttggagtcgagctagtcaccgatcgtgaactgaagacccccgccaacactgaaatcttgcgtgtcatggatctgatgaaagacatgggtgtattggtcgggaagggtggattctacgggaatgtgttcagagtaaccccgcctctctgtttcaccaaggaagattcagattacctttgtgatgtgatggaca

SEQ ID NO: 2315 - DNA, 289 bp, Lilium asiatic
  Clone ID: LIB3229-043-P1-K1-B5
aaggaagctccagcttctcgccgggtctctctgaggaagaagtctggttagagagtttgttaccttgtttctatgtttggtttttggagaaatctcttcaactcttgatagtagaataatggttagattgagttaatactgcttttgagtttcgtcttggtcatgtcttgtgtatcggatgtgattcgggtgaatcggcaatcggtatgcaatgaattggaattgcaagtgcaaatatggtgtttgtttttatgctccaaaaaaaaaataaaattataaaaattaaaaa

SEQ ID NO: 2316 - DNA, 352 bp, Lilium asiatic
  Clone ID: LIB3229-043-P1-K1-B6
gttcccgatctagcccttacaactatggcggtgacgaagcaggccccgatcacgatccgaactcggaagttcatgaccaaccgcctcctctctcgcaagcaatttgtcatcgacgtgttacaccccggtagggcgaatgtctcgaaggcggagctgaaggggaagctggcctcgatctatgaggtgaaggacgctaacgcgatcttcgtgttcaagttccgcacgcacttcggagggggcaagtctactgggtttgggctcatctatgataatgttgagagtgccaagaagtatcagcccaagtaccggctcatcaggaatgggctggctactaaggttgagaagtcaagaa

SEQ ID NO: 2317 - DNA, 336 bp, Lilium asiatic
  Clone ID: LIB3229-043-P1-K1-B9
cccacgcgtccgcggacgcgtgggtcacaaactaatatctagtatgtcttaggggaacttttttttgttgcttttggtgaatttattgaggaatttacctgggccagctcgcgctcaccatgacaaattatcatccaaaatattgaggcataaaggtaatcccctaccaagctgctcattctgggattcaaactcaatttccatccggagtattgaggcgtaaattcaatttccatcctgggtattaaggcgtaaaggtaatatcctaccaacctgctcattttgggattcatcctctgtcaagactacagtctttgtgtcactctgcctaccaac

SEQ ID NO: 2318 - DNA, 309 bp, Lilium asiatic
  unsure (1)..(309): unsure at all n locations
  Clone ID: LIB3229-043-P1-K1-C1
gtcgaagcagcttggcaatactaaggtgtcttcaagttcctcacaatccctcagggggagaaacatcctttttagcatgcggntccctaaccttcaatgacagagtcgccgtcacagcctgaaaaagcttctcccgactcatcatctgttcttagatctcatattgattttggaattaaacacggcatcgactaccctgtgtcaatgtgccaagtctgcatctgacatgacttgctgtacgggaaataatagctgaatgcggctatcttttatctccttaagtcatgtggggagtgggtgagttgcata

SEQ ID NO: 2319 - DNA, 411 bp, Lilium asiatic
  Clone ID: LIB3229-043-P1-K1-C10
ggaacagaccccttcaaacactggagaacgtgttcatttaaccaaagagctccttgccaactgtgaaagcattgaatggcaggtagatgagctggataaggcaattgcggtagctgcaagagatccttcttggtatggccttgatgaagttgagcttgacaaacgaaggaaatggactagcactgcccgtagtcaggtcggtactatgaggagaactattgagggaggaaaggagaacagctcgataagcaccaatctcaatggatcacgccaagagctgatgaggcttccaaatgaccgtacttcgcaagccggcagatcaaatcattaccttgctcaaaatgatgatgattttatatctttcggaatcagatcggcagatgctccttataaaaggacaagatgaggaac

SEQ ID NO: 2320 - DNA, 291 bp, Lilium asiatic
  unsure (1)..(291): unsure at all n locations
  Clone ID: LIB3229-043-P1-K1-C12
cccaaanncaacccaccgcccgtcaattaacaactctataactaaaaaaaccctgtcccaacccaacttaaacgccttgcatcacatccccctttctccaactagcaataataacaaaaaagcccacaccgatcaccctacccaacagcaactcaatcttaatttctaatattactcacccaaaagccgctctttaatccctacagcgaaaaaaaaaaacgctcatcataacccctacaactaaacaaaaacttaaccccctcttacaatatccaaacttcccctcccttt

SEQ ID NO: 2321 - DNA, 369 bp, Lilium asiatic
  Clone ID: LIB3229-043-P1-K1-C2
gtcagctcatgcgggcatgatggccccttcggtgcaactggtgtgaagcgcctgaaagatatcggcatgatcgactctgtcccaagcatgaaggcactcgacatgaacactgctgaggatgcgattgtgcgtttgactagagaggtcgtgccggggatgatcgtcactggcatggaggtggcagagatcgacggagctccgagaatggtaatagagggttttcaattttcaatttaggatttattttaagtttagttggagctaacatgtgttgttgggattgtaggggccgacttttggagctatgatgatctcggggcaaaaggcagcacatcttgcgcttagggctcttgggcgtggcaatgccct

SEQ ID NO: 2322 - DNA, 411 bp, Lilium asiatic
  Clone ID: LIB3229-043-P1-K1-C3
caggttgctggcgggggtaggactgagaagccccttctcaaggctggtaatgcttaccacaaataccgtgtaaagaggaactgctggcccaaggtcagaggtgtggccatgaaccctgttgagcatccccacggaggaggtaaccatcagcatatcggtcatgcttccaccgttcgtcgtgatgccccacctggacagaaggttggtcttattgctgcaaggaggactgggcgtctcaagggtcaagctgctgctactgcttctaaagagaaggcttaaggtgattttgttcgtgtttctactgctttattggtgttttttttaaagagagacatttgttgtttgagcttgtttctgtcgttggctttgttgcctgtgatatctttttgttgagaactagattattatgct

SEQ ID NO: 2323 - DNA, 334 bp, Lilium asiatic
  Clone ID: LIB3229-043-P1-K1-C7
tccagttctgcttgctgctgatttgaaaaagaagactgaaacccttgacagggtctgtaagccaattatgacaaaaccgaagccaaagccggctaagcctcagtcagctcctccggcagagtctcaggctcccacgcctgaaggctcttctcagcaacctgaaggggagcccaatgcaagtgatcatgtgccggagcctatggagaccgataaatcggagactggatctgagtctacagcgtaaaaaagggtcataaatatctgcatctataattatggcaagcctggagcccttggtatgtttcaactgtcaaccttggacaataagtttgat

SEQ ID NO: 2324 - DNA, 401 bp, Lilium asiatic
  Clone ID: LIB3229-043-P1-K1-C8
cgccgtccctcgtccataaaaacttcaaatcagcgaatattttgctagacacggagctcaaccctcatctgtgagatagagggcttgcaagccttatccctaatgcagaatatcagacctcggataataacaatgctcctgaggttgcgatgtctggccagtataccatgaagagtgatgtgtacagttttggagttgtcatgctggaactcctgaccggacgaatgcctttcgatagttcgaggccgagatctgagcagtcattggttcgatgggcgactcctcagctccatgacattgacgcattggacaagatggtcgatccagcccttgagggtctctaccctgcaaaatcactcttttcgtttggcgatgtgggtcgcctctgtgttcagacagag

SEQ ID NO: 2325 - DNA, 367 bp, Lilium asiatic
  Clone ID: LIB3229-043-P1-K1-D2
cgaataggtcccctaagctagcactgtcggggttgatggacaagcaacaaacagttgtcaatgaaacagatacaagccactctacagcccctgaagagggggttgctgataaagagggcatgggtgtccagtcagatggagatgagactgaggatgttatcgatgaggaggaggctgaatgagctgcaagcctgcagctgctagaagtaggttgaagaggagcatcctttatcacttttgccttttaagaaaagaattatgtggtcatttagaattagggtttgtgctgtgttcttacgcgagtgatttgaaagtaacaaatggttgctatattggggagtagtcaaagatattatgctgtacccat

SEQ ID NO: 2326 - DNA, 314 bp, Lilium asiatic
  Clone ID: LIB3229-043-P1-K1-D4
acaatttcaaacagtgtcatactgatcaccgttgctacattaagtataaaagcacatacataatactactctctctgttgctacggtgatcagtatgacactgtttgaaattgtttctctatgtagttaaattttttgtaccactaatgtgggtatgtttccggttgtgtatatttttctttgatctgtatgtaaaattgtttgtttgtacataacctttaagctgatgcatgtaaattttcttttctgatttttcttgtaggaaagttagtttttgatccatcggcttacaaatatatgttctttacaatcac

SEQ ID NO: 2327 - DNA, 421 bp, Lilium asiatic
  Clone ID: LIB3229-043-P1-K1-D5
gcagaaccagcaaaaggtgtaatagtttggcgatggagaagggtaagagctcagcaaaggcagcatggagccctccacggctgccaaggaagaaggtggcagtgaggagcgtaacgagagaggaaattgacaggttctggaggaggaagcaggtcgaggaagaagaacgcctcctctctgcacacaaggcagcagcaagaattcgagctcaggctctcacggagggagactaccggcggttcgagcaatctctttggaccatcatcgacgagaacaaggaattcaacaacaaaaccagcggcggaaacaatatagatcagctggtgggaatcaaggattggtggaccaaaagcaaatatgcatatctgaatcaacctgctatcaagtccatgggagactgtgcaggtagaagagagacatc

SEQ ID NO: 2328 - DNA, 380 bp, Lilium asiatic
  Clone ID: LIB3229-043-P1-K1-D9
cccacgcgtccgcccacgcgtccgcccacgcgtccggagataaggaccatggtggggtgcgtgatggaactactgtcgtactctgggagtacctcaaaggcaaaaaccagaggtggaagattgttccttactgatcgagctgatggagatgccactggtggtaccttatgtcttccaaatctggtctccagggcactttattattggtctctgagtcttcggaataagttttgcctcatataggtgaatgtgtatgtgtttatgttatgcgactgaatgaatgtttgtgatgggttgagtgagactgttaaattatgatgtacctcttttgttatatggctgagtgaatgtttgtttgtgatggatccggcgagactggt

SEQ ID NO: 2329 - DNA, 399 bp, Lilium asiatic
  Clone ID: LIB3229-043-P1-K1-E1
gccgactcggctaagtcgctaagatcggacggagaaaaagcttcgggataggaccaagctatctaagaagatgaaaggggggttatgcggtcggatgtatcgacacaatctgggcgaagacaccaacaatgtacagaggccttccatcaaccgaaaagcatctggttgaaacagaggacccagacttagatctgtaagtgacgggtccattcccgttgctgatgaagtacccgtcgacagctcctgatatcaatgtagatcattgagtatctctatcgatatctttgtttttggtccgaaagatatttacattgtgtttccctatcgatatctttgtttttgttccgaaggatatttacctttcgcctcgaataaaaaactgaatcgtcctgtcctatc

SEQ ID NO: 2330 - DNA, 402 bp, Lilium asiatic
  Clone ID: LIB3229-043-P1-K1-E10
cggacgcgtgggtggcaaccaagttggtaattgaggttgaagtgaagaccactggtgacaaattcttcggcgccatcaccgactccaccgcccttttcccaaagatcttccctgagcagtacaagagcattgagattgtcgaaggagacgggaagaccgttggctccactcgtctcgtcacatatgccgaaggaatgccactggtgaagaccgccaaggaaaagattgagattgccgacgaagctaacaagacggtggcgtacagtgtgatcgatggggagatattagaccactacaagcccttcaaggtgacggtgactgtggtaccgaagggcgatggagcggtggtgaagtggagccttgagtatgacaaggtgaacgaccaggtgccagggccagaca

SEQ ID NO: 2331 - DNA, 194 bp, Lilium asiatic
  Clone ID: LIB3229-043-P1-K1-E11
cccacgcgtccgcggacgcgtgggctttagttgagttactttttaatttctgtgttctgcactagctacctagaatcgtatgacttgtctctgtggaactgcatcaacatttgtcaaaccaggtattggtgttgaatgcttttatctgctgtttcttttctatgttggtgtgattgttgtagtgacttataacc

SEQ ID NO: 2332 - DNA, 405 bp, Lilium asiatic
  Clone ID: LIB3229-043-P1-K1-E12
ctggacgccatgaaagctgttgcggatgctcactcgaaaaggtcgcttaaattcgtcgagacggctctgcgggactacaggtcgcagctggaggacgacccgatcgtccaccggcatctctcctcgctgtatgacacactcttggagcagaacctatgcaggctcattgagccctattcaagggtcgagatcacgcatgtatcggagctgattgaattgcccgtggaccatgttgagaagaagctgtctcagatgattcttgataagaaattctcggggacgctcgaccagggagcgggatgcctgatcatctttgacgatcctaagcctgatgccatctttcctgccacgctcgacacgattacgaacattggtaaggtcgtggatagcttgtatgcgagatct

SEQ ID NO: 2333 - DNA, 311 bp, Lilium asiatic
  Clone ID: LIB3229-043-P1-K1-E2
gagttttgagtatgtatgtggagatagtttctgggctcctgacaagagattaacccatacctgatttcagcttggataatgtctttaaatgatttacaaattaactaagtaaaaaaactatgcacaacacgttataacactcaattagttttgttcaacaatataatatttggtatatggtgctatactatagggtttattataatgaatgtagagtatacaaaatatgaaaggaagataaattcctaaagcctaaatttctattagactacgaattatatagttacacttataaacaaggctgatttgtc

SEQ ID NO: 2334 - DNA, 137 bp, Lilium asiatic
  Clone ID: LIB3229-043-P1-K1-E3
ttttatttttatttttcttttcttctgattttttatgattaggcctcctacaagggctgtgttgggtcatgtgtattcataattatgggccaattataaggtgtgaaacatttgatgataattatatattatctcac

SEQ ID NO: 2335 - DNA, 289 bp, Lilium asiatic
  Clone ID: LIB3229-043-P1-K1-E4
ctcatatatgaatttgcagctggctaacactgaagaattcattgatgggcagttcacgggaaatcttggagaaatacttataaggagcaacaatgtactgtacctccgtggtgttcctgaagatgaagaaattgtagatgcagaatgacgtccggcaagatccttatgactctgtttcgtatcattaaatatgtttgcttaatatccactggttttattgtaaatcatgtgttgcattttcgacttgatgctctttcgagaaacaatatgctgttgtatttttgattgc

SEQ ID NO: 2336 - DNA, 142 bp, Lilium asiatic
  Clone ID: LIB3229-043-P1-K1-E5
gggtctctttgtgttcagacttgttattgtattggtcggatgtttttgtttttgtgattgtggaaccaaagcctctttggtatgctctgctctttcttttcttttaatcctctgcttccaaattatttttatttttattgct

SEQ ID NO: 2337 - DNA, 333 bp, Lilium asiatic
  unsure (1)..(333): unsure at all n locations
  Clone ID: LIB3229-043-P1-K1-E6
aagaagggcaagagcggcccaagagttgctgcttgagtggttaacttcactgggtatggggtataaagttcatcttatgtgcaccttttcttttagaagctggatcataaacatcttgttatgccctgtttgaaatttcttttagtgtaagttttatatgcggtagttttaattggatatttagtgttaacttttcatttagcttgtatcaaattttgatgttccgtgaaccatatcttgagataattattatctttgattcttgataagaaattctctnaaaccctcgaccagggaacgggatgcctgatcatctttgaaaagggcggccgc

SEQ ID NO: 2338 - DNA, 370 bp, Lilium asiatic
  Clone ID: LIB3229-043-P1-K1-E7
gccgaaaggacggggtctacatgtactttgaagataatgctggagtgattgtgaatccaaagggtgaaatgaaaggttctgccatcactgggcccattggaaaagagtgtgctgatctatggcctcgaattgcaagtgctgcaaatgctattgtctgatgctctaactcctgttctgatgaattgagtttctcgtgtgttgttagtattttatgcagcacttaaatctgaatttggttctatgtagttgagcacaaattttgttgaatcttgctggtgatgttttgttatggtgcttgaacttttgttaggaatgatctgaaggatatttgggattgcttttacaaatatgctttggtcttgtttggctc

SEQ ID NO: 2339 - DNA, 287 bp, Lilium asiatic
  Clone ID: LIB3229-043-P1-K1-E9
gaaaatgggcatacaaattctgcagaaaattgattctgggttactttgattaggttgtttttttaatattttgtataaagcttagtttgtgggtgttagaggaatttggtttcctggtaggtattttagcaagaattatgttatgttgtcatggcaggatttttagcaatctagttaatattttccggtggtttgcaaatgtttcaaattaaatatatttttttaaattaaaaattaaaatattatatatatattattttatatattaattttatattaaataaaaa

SEQ ID NO: 2340 - DNA, 358 bp, Lilium asiatic
  Clone ID: LIB3229-043-P1-K1-F10
ggtcgctacttttaccatctctaagtggttatttcttgagcgattccaaggccgacaaaatctcgattgtgcaatctgcggcaacgtatgtaagggagctgaaagtggttaagaatgggctgaggcggcgcaatgaggagattaattctatattatcaagtggagcttttggtgacagtggggagagagtgaggatacaggtcacagaatcaccgtcggctatcgagtcaatgatcggtgctcttcggtgcttgcagagcatgggtgtcaaggcgacgggcatccactctgtactctccgatcatgagttatctgcgtccgtgaatgtcgaaacccgcaagacgtcagctgctgagct

SEQ ID NO: 2341 - DNA, 420 bp, Lilium asiatic
  Clone ID: LIB3229-043-P1-K1-F11
cttccaaagctcgaatctctcatcaatcatgtcaggccgcggcaagggagggaaggggctcggcaagggcggcgccaagcgccatcgcaaggtgctgcgggacaacatccagggcatcaccaagccggcaatccggcgcctggctcggcggggcggagtgaagaggatcagcggccttatctacgaggagacccgaggcgtgctgaagatatttctggagaacgtcatccgcgatgccgtcacctacactgagcacgcgcgccgcaagacggtgacggctatggatgtggtgtatgctctcaagcgccagggccgtaccctctatggctttgggggttgatctgtttctgtttatccggatctctgtttgtttgttttggatggtaatttgggttgtggatcattagatttcatgtatct

SEQ ID NO: 2342 - DNA, 391 bp, Lilium asiatic
  Clone ID: LIB3229-043-P1-K1-F5
gtttgacagtatcgcaactctcgcagttgcccagaacatgcgtgagctttacagattggttcttgttgatacaccgttggctccctacttctccgagtgcatcacatcagaggatttggacgacatgaatattgagattatgaggaatactctctacaaggcatatctcgaggatttctacaagttctgtaagaaactaggtggagctactggcgaaataatgtctgaccttcttgcctttgaagctgatagaagagctgtcaatatcaccataaacagtattggcactgagttgactcgagatgaccgtcggaaacttcattctagttttggtctactgtatccctatggtcacgaagaacttgctatctgcgaggacttcgatcaagtc

SEQ ID NO: 2343 - DNA, 408 bp, Lilium asiatic
  Clone ID: LIB3229-043-P1-K1-F8
tggaatcttgggagtctcttagatcaggcatcacacaacttttgaaaggaacgggaatctatattattggagattgaactgagatcaatcagaaagttgctaccatactggctaatggtatcggatatactccactttgtactggggatttactggaaagctatgcacaccaatcaatcaattcatgggtgatttcagaaggtgcagatgcagttgctgaagcagaaggtcttgtattagaaagtcttagtagtcatgttcgtgctgttgttgcaacactgggaggagaacatggtgctgctagaaaacctgacaagtggcgttatctgcatgcaggatttaccgtttggttgtctgagtctgaggctgcagatgaagctttcgcaaaagacgaagctcgagtggaca

SEQ ID NO: 2344 - DNA, 405 bp, Lilium asiatic
  Clone ID: LIB3229-043-P1-K1-F9
tcacgatctccgagcacatcagccatggcggatcagctcactgacgatcagatctccgagtttaaggaggcgttcagcctgttcgataaggacggcgatggttgcatcacaaccaaagagcttgggaccgtgatgcgctccctgggccagaacccaacagaggcagagctccaggacatgatcaacgaggtagacgctgacggcaatgggaccatcgatttcccagaatttctgaacctgatggcccgcaaaatgaaagacaccgactcagaggaggagctcaaggaggccttcagagtgtttgacaaggaccagaatggcttcatctctgctgctgagctccgccatgttatgaccaaccttggcgagaaactgacagatgaggaggttgatgagatgatccgt

SEQ ID NO: 2345 - DNA, 363 bp, Lilium asiatic
  Clone ID: LIB3229-043-P1-K1-G10
cccacgcgtccgcggacgcgtgggcatgatacgaattaaggtagcctgcagcgggatcagcgtggccgtccctaaggctaaggcaaatgcaactgctacgtcggcggacgtaagttgcaaggtgaagctccacatcaagatctggaaatggacaatttagatcaagggagaacagattgagaatggggaaggtagtactagtttgcattatttgtaaatcttattttgaataagggggaaggcagtttggagattgaagttttttattttattttctgtcatatatttcagtattgttagtttttgtagtattgttttattaatttgattgaatgaaagtgttattgtgatttgatttcgaat

SEQ ID NO: 2346 - DNA, 375 bp, Lilium asiatic
  Clone ID: LIB3229-043-P1-K1-G11
ctatcagccgcctactgtggttccggttggtgaccttgccaaagttcagagggcggtttgcatgatctccaactctaccagtgttgctgaggtgttctctcgcattgatcataagtttgatctgatgtatgcaaagcgtgcttttgttcattggtatgttggtgagggtatggaagagggtgagttttcagaggctcgtgaagatcttgctgcactggagaaggattacgaggaggttggtgctgagtctgctgaaggtgaggatggtgaagaacctgaagattattgagcagttacctatcgttactgtgttttagcgtgtttttctataaactctgttcttgctgggagtttcttggtagtgccttctttttc

SEQ ID NO: 2347 - DNA, 396 bp, Lilium asiatic
  Clone ID: LIB3229-043-P1-K1-G12
ggagaatttgcagaagagcaagatcttcttcatagcatggtctccggacactgcgcgagtgaggagcatgatgttgtatgccagctcgaaagagaggttcaagagggagctggatgggattcaagtggaattgcaagcgactgaccctactgagatggacctcgatgtgattcgaggccgtgccaattaggtattgcctttgtttcttacaaaggagaatttctccatgcattctgtggttgcttttgcgagatgtttatagtctcatgggaccgttaatttgctagatatcatgtgtgtttagtgttggtacagttatgatctttgatttcgggatattattttgttggtatattgtgggatctatgtgacaaggtcttatagctttgtgcacac

SEQ ID NO: 2348 - DNA, 393 bp, Lilium asiatic
  Clone ID: LIB3229-043-P1-K1-H10
gtgtcaggccagttttatttcatggagatgaatacccgtcttcaggttgaacacgctgttactgaaatgattgttggtcaagatcttgtggagtggcagattcgtgttgcaaatggagaacctctaccattgactcagccactggtgcccttgaatgggcatgcctttgaagctcgaatatatgctgaaaatgttcccagagggtttctacccgcgactggaactctgtttcactaccgtccagtttctgtttcaccctcagtgcgagttgaaacaggagttgaagcaggagatactgtcagtatacattatgatccgatgatagctaagcttgtagtgtggggagaaaatcgcaacatggccttaaccatattaaagaactgcttgatcaac

SEQ ID NO: 2349 - DNA, 368 bp, Lilium asiatic
  Clone ID: LIB3229-043-P1-K1-H11
actacccagattatctgtcaaacaaattctgctactgaaacagtccatctgcctgccatctaaagctcatcatgagcatcctcttccttctctagatcactatcctcatccgctgcatcagcatcatcaaaaccatcttcatcatctatatcagcatcatcatcatccttcgactcctcctcagttttactcttctcagcttcatcaaatgcggccttctcagcatccttctgctttccccatgtttcttcagcaagcttctttgcatattcagggtcatcagcaactagaacattgtcaaacaatgttccggatttcacctgccatagctcaatgccaacatatttcagattgtcaaaaagcataat

SEQ ID NO: 2350 - DNA, 322 bp, Lilium asiatic
  Clone ID: LIB3229-043-P1-K1-H12
ataaggttcaaagtttggaggatcttttcatgaaagtagttgctagaccagactggccattcaatttatataccagtcctccgaagcagctaatcaaagacacatcaaaagatttctactcagctgggtttgctcctggagctaatatttatttctcgtacaacctacccaaaggttctgggaatacgggtccgtaccttcgagacgacatcctctctctgaatgggctgactctcccccctaagacggtagatactgtcaactctgaacccgaagctactgttgggaaagctcctgctgctagccctgaacctaaacctgc

SEQ ID NO: 2351 - DNA, 261 bp, Lilium asiatic
  Clone ID: LIB3229-043-P1-K1-H3
cgtccgcgggttgatattcttgaagcatacattttttctgtaaaagcagatcctgccagaggcgggggtggtatttttgtctttagctcaacggttgatgaggatcttgcgaaggtgatccgtgagttcatgagtccaactgatggtgagacaagaatgttttattagatagttgttgcacctaaatatacttaaagaggtctcgatgtgcttcgtggcaaatcaaagactttgaggattctggaggcaaataagaccgag

SEQ ID NO: 2352 - DNA, 432 bp, Lilium asiatic
  Clone ID: LIB3229-044-P1-K1-A1
acggcgcagccaagacttgctttggacaggccatgtttcaggtaagcagactacaaaaaggatatggcagtgctgaagcgtgtcaagaatgagtgcgtcggtccacacaagaagccatattcacggtccattgctggcgccactttagaagtgattcagactaaaagaactgtgaagtctgaagtgagggatgctgttagggaagcagatctgcgcgagatcaaggtgaggataaagaagaccaaggatgggatgtaagctaagatggcagcgaccgtgtacaagactcagaagacgcatgccacagagtagcgtgcccaagaccgtcaaaggaccaaaacttgactgcggctgtggtaagcgatgatagaactcatgcctagacgttcagtgccaattttgattccttacctatccaaattgagaactctt

SEQ ID NO: 2353 - DNA, 388 bp, Lilium asiatic
  Clone ID: LIB3229-044-P1-K1-A10
ggatgacatgaacaggttaaagatatcaatctggttgcgacatcggattaacttgcaggacatgggattgaagtggaaaaggagagagcttattcttcaagagctgatcagggttttgagggagcaggatattgagtatcggatgttacctcttgatgtcaactgcaggagcttgccggccttgtcctccgcacgtctgccatccacttggacgagctgcggctgattccatggacttataaggctgttcagacagttatagtgccggtcagattaggaaatatgtgacagataaacagaggctagaattttggcgagattggatgcgttgccttctcttttcttagttagggttgcacatatgtcttaagagctatttcgggtgata

SEQ ID NO: 2354 - DNA, 386 bp, Lilium asiatic
  Clone ID: LIB3229-044-P1-K1-A11
ggcaatttgaatttcacacaaatggcttctggacaagaagcagaagtagctgctagtgaaaatgtacttgaatggccacaaaaggacaagagaagattcctacatgctgtttatcgtgtcggggatctagaccgtactattaaattttacaccgaagctttggggatgactctgttgaggaagagagacgttccagaagagaaatactcaaatgctttccttggatatgggccagaagaatctcattttgtggtagaattgacatacaactatggagtggacaaatatgatataggtaccggctttggtcattttgcaattgcttctgaagatgtatataaactggccgaggtcattaaggccaagggcggtaagattacccggga

SEQ ID NO: 2355 - DNA, 381 bp, Lilium asiatic
  Clone ID: LIB3229-044-P1-K1-A12
ctgccatggcgtgcccctccttaccactctgtccactggctataactgaagcagagagagggatacctaaaattcttaagcgggttcgagctgttttcgataaagtgggtatcaagaacgaagagtcggtagttattagggtaaccggctgccccaatggttgtgcgagaccgtatatggctgagctcgggctggttggtgacggccccaacagttaccagatctggcttggggggatgcctaaccagacttcactagccaaagtccttcatgaataaggtgaagatccaagatctagagaaggtcatggagccgctgttctacagctggaacaaaacaagacttcagggtgaatcatttggtagcttcacaaaccggatt

SEQ ID NO: 2356 - DNA, 367 bp, Lilium asiatic
  unsure (1)..(367): unsure at all n locations
  Clone ID: LIB3229-044-P1-K1-A2
cccacgcgttccggnatggcttttgatgtatcatgcatcnagaggnnannagtgtgagntgcaaacaattatcggttttttagttccacacaaaagcctgatttggggacatgcaaggccatccgtgtttgagataatttatggtactatcggaaggctcttatgattcctaacatactttcttttaagtcaacaccttgacaccgtgtcaattggagattgaaactttgtcggagactctcccagtagcttagtgcaacagcacatgtttgcctcccattacttgaacaaatagggtaaaacgtggataaaatcaacctaatagttattttgaattgatatggtatctcaaaactcagtatgaaat

SEQ ID NO: 2357 - DNA, 392 bp, Lilium asiatic
  Clone ID: LIB3229-044-P1-K1-A6
agaaggcaaaggagtgggcggcgactttctacgaggaaactctctattctgttagaagttaaaagataatgtgatgtttggaggcaatgggtgaagagttgagggaaagcatatggcgtggcacatattttggtctgtatgcaggatggatgtgagtgatttgggatttcatgctcgtctgttcttggctcatattttggtgcaggaggcacttaggcaatatgaatgcatggtttggaattatatcttcatgtatggaacaatctgttacttcatattgggcttatgtttatattttggtctggatgcgtgatgaatgtgatttgggattccatgctcgtttgttcttggctcatattttggtgcaggaggcacttaggcaatatgaatgc

SEQ ID NO: 2358 - DNA, 357 bp, Lilium asiatic
  Clone ID: LIB3229-044-P1-K1-A7
cccacgcgtccgggagggctctgttgatcatgcatcagagggatgaggttgagtgcaagcgagagcggcatgttattgttcgcaaagcctgatttggggacatgcaaggccatccgtgtttgagataatttatggtactatcggaaggctcttatgattcctaacatactttcttttaagtcaacaccttgacaccgtgtcaattggagattgaaactttgtcggggactctcccagtagcttagtgcaacagcacatgtttgcctccgattacttgaacaattagtgtaaaacgtggattaaatcaacctagtagttattttgaattgatatggtatctcaaaactcagtatgaaa

SEQ ID NO: 2359 - DNA, 402 bp, Lilium asiatic
  Clone ID: LIB3229-044-P1-K1-A9
agaaatcactgaccatccgatcaaatccctccagcaatgtccggcggcgccgcgagaacgaagcccaacattctaataaccggaacgccggggacggggaagacgacgacgagctccctcctcgccgacgccaccggtctccgccacatcaacgtcggcgacctcgtcaagtccaagaaccttcacgacggttgggacgacgagttcgactgccatatcatcaacgaggacctggtatgcgatgagttggaagatgcgatggacgagggtggcaacatcatagactatcatggttgtgatttcttcccagaacgctggttcgactgcgttgtggtccttcagaccgacaactctgctctacatgatcgcctgacaaatagaggctacacagggtcgaaactg

SEQ ID NO: 2360 - DNA, 120 bp, Lilium asiatic
  unsure (1)..(120): unsure at all n locations
  Clone ID: LIB3229-044-P1-K1-B1
acgcgnccggcancaacccagnccttgtgccgagcaagactgtttaaggagggccgcgctgcccgggagcttggatccaagcttcacagtgtctgctataaaggcaccaaaatgcacttt

SEQ ID NO: 2361 - DNA, 183 bp, Lilium asiatic
  Clone ID: LIB3229-044-P1-K1-B10
agataatgaaggtgaagaagaagagtgattgttctttactctgtttgaactgatctttgaaaagaatattcctatttcaaaatgtttgaatttttgctaagttatgtagttggaggatttgtagttttttgtcagcatctatctggaaccgtgatcttgtttgctacttggtttgtttgagaa

SEQ ID NO: 2362 - DNA, 387 bp, Lilium asiatic
  Clone ID: LIB3229-044-P1-K1-B2
ctgagcctttctcgctggagcaattccagatttcattgatgagaatgtgcagataataatgctcggaaccggcaagaaaatctttgaaaaacaggtcgaagaaatagaagagaagtacccggacaaggcgagaggaattgcgaaattcaatattcccttagctcatatgatgatggctggaggtgatcttatcatagttcctagtagatttgagccatgtgggcttattcaacttgaaggcatgcaatatgggatgccggtcatttgttcgaccacaggtggtcttgtagacacagtcaaggaaggattcactggattccacatgggcgccttcactggtaattgtgaagctattgatccagtggatgtggcggcgactgttaaaac

SEQ ID NO: 2363 - DNA, 303 bp, Lilium asiatic
  Clone ID: LIB3229-044-P1-K1-B3
gtttgtggcgggaattctccgacgaatgatcggcttgatgatatattcttcttcactccgagcatctgagaggtccagggttgaagagggagtatggtttactgaaaattatgtgtttgccatgtttggcatggtctgttgtgttactaagcatcatctgcataaattctgccttacgggacatctcatgataggcatgaatgggcttgttttaggttttatatgttagtaactgatcgtataattatctttagaaagtgtgtgtgccctcttgtttaagaagggcccgtttttcaattgttc

SEQ ID NO: 2364 - DNA, 392 bp, Lilium asiatic
  Clone ID: LIB3229-044-P1-K1-B4
gccgagcagagctggaattgttattggctggtgatcaggctgctgaaaatgctcccaagggctacaacatgaaaactaaaaaagtaaaggggaagaagggtaaaaaagggaaggacgcgccggttgtggacaagttgccagatgaagaatacaaaaatgatccgcggttctcttctctcttaagtaatcctctctatgcattggatccgactgatcctcaatttaaaaggagtgcagcttatgcccgacagagatcgaggaagcacgagaccggtgggatggacaaagcaacaactgaagaagctagccgtctatttgaacgtgatcatatacagcctgatgaggaagtcccagataaaaatagtaatctgccaattattgggaattcatct

SEQ ID NO: 2365 - DNA, 396 bp, Lilium asiatic
  Clone ID: LIB3229-044-P1-K1-B6
attccctcatttcgaactcagagagagagagctgaagagatggaatctggaaagatagccaagggtgctgccggccgcaagggcggcgcaaggaagaagtcggtcccgagatccatcaaggctggcctccagtttccggtaggccgcattggccgctacctcaagaagggtcgctatgcaaagcgtgtaggctctggagctcctgtctaccttgccgccgtgctcgagtaccttgctgctgaggtgctggagctggctggcaatgctgccaaggacaacaagaagtctcggatcatcccgagacatgtctgccttgctgtcaggaacgaccaggagctgggcaagctgctcgctggagtcaccatctcccatggcggtgtcatccccaacatcaac

SEQ ID NO: 2366 - DNA, 392 bp, Lilium asiatic
  Clone ID: LIB3229-044-P1-K1-B9
gaagaacttagagaaagtctgtgctgatctcgttcgtggtggaaaagacaaggggttgagagtgaagggacctgttaggatgcctactaaagtcttgcatatcaccacaagaaagtctccatgtggagaaggtacaaatacctgggaccgctttgaactgcgagtgcacaagagggtgatcgacctggtcagctccccagaggttgtgaagcagatcacctcaataacaattgaacctggggtcgaggtggaggtcacgatttcagactcttagatggttattgtcatcacaagttggttggtcttaatgttactcattttggtgtcagatgttttgtgttgttgttgagtgtcccaaacttttatggatgttacctttgaaggattgaatt

SEQ ID NO: 2367 - DNA, 395 bp, Lilium asiatic
  Clone ID: LIB3229-044-P1-K1-C10
cccacgcgtccggccgccgccgctgccgctgctgccgcccgccggagaaatggccgttccgcttcttaccaagaagatcatcaagaagcgcgtcaagaagttcaagaggactcagagtggatcaaaggatatgtgtaaggcaaagctggcgtaggccgaagggtttggactcccgggtgagggggaagttaaggggagtaactttgatgcccaacattggttacggttcgaccaagaaaacccgccattacctgcccaagggtttaaggaggttggaggttacaatggtggcgcgcctgaaatggttatatgtgccatacacaggacatctggcgcgagagatagcccacaacatctatacaaagaagcgtaaggttattgtcgcgcgcgctgca

SEQ ID NO: 2368 - DNA, 381 bp, Lilium asiatic
  Clone ID: LIB3229-044-P1-K1-C11
aaaaactctatgggaaagaaaatgttgcagtagttatgcatggcttcgaagctagtggacaaaattccacagaacaagatgctagttggcttgatctttttggtaaacgctattggaaagttgtgagcgtagggatggcattattcttatttcagcaattagctggaataaatgcggtggtgtattattctacatctgtatttcggagtgctggaattgcctctgatgttgcagcaagtgctcttgtgggggcatctaatgtctttggcactgcaattgcatcttcattgatggacaaacaaggaagaaaaaatcttctgattacaagctttacgggaatggctctttcaatgttgcttctttccttgtccttcacttggg

SEQ ID NO: 2369 - DNA, 218 bp, Lilium asiatic
  unsure (1)..(218): unsure at all n locations
  Clone ID: LIB3229-044-P1-K1-C12
ggcccacgcaaccgaaaaaccctatccaaaagaaaatgatgcacaagataagcataaccacnaagccgtgttgacataaaaacatttttcgagcaccanaaacnccacanccaacaggtaaacgctatcacaaagtaacgagcgtaaggatggcattatccttatttcagcaattaactggaaaaaatgcacaagagcaccattctacatcagcatac

SEQ ID NO: 2370 - DNA, 401 bp, Lilium asiatic
  Clone ID: LIB3229-044-P1-K1-C2
gtccagcttagaagcttccccaaaaccaacgccggagatcgagatcgtaagcgatgtcggcgacgcaggcgatgaagcggatcccgctgatcaaattccctcagaggcacctaaagccctcaggatccggatcgtctcccgcggctgccggtcagaagcttttctctcaatccgcccagccagaaaagagctcaacagctaccgagactcgaagctatagatacaggtcggatgttcctccaccaccatcccatactgctggaggtgggaaggcttctctcctgccaaagcgcaccccaatttcagaagaagagattgaggccattttgttgggcggctgcatttgattttgtcactcttgaagatggactatgttcgcatgtcatgtaataagcaagttt

SEQ ID NO: 2371 - DNA, 396 bp, Lilium asiatic
  Clone ID: LIB3229-044-P1-K1-C3
cccacgcgtccgctgcattccagttatctgtttgacaatctctcaaaaaggtgtgatattgtagacgtggtggtagaaatggatcgaatactacgaccaggaggatgggttttgatccaggatactctacaaatgattaaaaaggtacgtccgatcctaaaatcgcttcactggacgacaacccttcatcaacagaagttccttgttgggaaaaaggatttctggcgtcctgccaattagcgtcaatatcatgccgatactcagagattgtaattttacatcaattctttgtcttctcttgggagagcaccatcaaaactctcctcagaaggggcttgttttacttggtacttctttgatgcctgattgaggtcgaaattttgcgatgaatcttat

SEQ ID NO: 2372 - DNA, 395 bp, Lilium asiatic
  Clone ID: LIB3229-044-P1-K1-C4
cccacgcgtccgtattaaaagaatcaaagcgtctagtttactattactactaagattattgtgatcacaaacttgtacctgcacacttacactgagcattgtcttcaatgcgatcatagcaatatgttgtgtgcattaacaagatgaagaattaatagggctaggtgcattgggaaaaaaatagaaaaaacctaggtttaggcagtttttattagctgataacttgtcctagctttcatctgtgattcccccacttgagcactttcatccatgtagtaaccttacaatcacaaccaggcagacaactcatgaaaacatatttcacagagcattatcgtcatcatcattatgtagcttatcaagttacactctgcatgggaaatccgaagttcacc

SEQ ID NO: 2373 - DNA, 287 bp, Lilium asiatic
  Clone ID: LIB3229-044-P1-K1-C7
cccacgcgtccgtccgcttccagagctcggcggtggcggcgctgcaggaggcgtcggagtcttacctcgttggactgtttgaggacaccaacctgtgtgccattcacgcgaagagggtgactatcatgccgaaggacatccagctggcgaggaggatccgtggggagagggcttgaagattaggggtttttattcgcttcttgcgaatatgttggcttcactgtctgaatatgcatgtgaaggtgtttggtttgtgttatctttgaagttgtaaactttctttggct

SEQ ID NO: 2374 - DNA, 178 bp, Lilium asiatic
  Clone ID: LIB3229-044-P1-K1-C8
cgactgctgatggttcgaccgtcaagttttgggatgcgaatcattttggagtcgtaaaaagtttcaacatgccacatgctgtggaatcagcctcgcttgagcccaaagatggcgataaattcattgctggaggagaagaaaaataaaaaggtttggctggtgtgaggccatctgtctt

SEQ ID NO: 2375 - DNA, 230 bp, Lilium asiatic
  Clone ID: LIB3229-044-P1-K1-D1
ggacggggaaggggagagaggtgatgagattggacttggagattggcttgtgtggggatttgaaggaggatctggatcttgagcttcgactagggtatacttagacccatggattatgatttgagtttctgtcccctgtggttttttttattttatgttgtagtagtattcttaaccctagaattttagtaggttaaattattgtaattttatggataattcagctgttt

SEQ ID NO: 2376 - DNA, 389 bp, Lilium asiatic
  Clone ID: LIB3229-044-P1-K1-D10
cccacgcgtccggaaggctgcgaagagtgataaggagatggagcatatgactttgttctatgctgaattggctctgatgcaataccctattgtgttgtaccgcccgtctttggttgctgctgcagctgtctatgctgcccggtgtactctcaacaagagtcctctgtggactgagactctccagcgccattccggttatgctgaagcacagttgctcgattgtgcgcagattatgatgaacagtcattcggcggcaccggagagcaagctgaaggttgcctacaagaagtatagtagtgctctgtttggggctgtggcgctgcgccctccggcaaccaaggttttggaggagttgaaggcatcatcatcagcagcagcttgaatgatgc

SEQ ID NO: 2377 - DNA, 390 bp, Lilium asiatic
  Clone ID: LIB3229-044-P1-K1-D11
cccacgcgtccgcaaacaatctggttgccagtactacgtttttctccgagagcactcgtgcaatgctttgtttgataagagttgaaacggatccgtcagacaggacgcaactgaggttaaccattgcttctggggatcctgcattgacttttgagttgaaggagttcatcaaggaacatatggtcaacattcccgtagcgaccccaacatctgcacctacggctggtgtcgctccagtacagcctcagtcacctgctacggcagcaggatacgatgaccctggagccatgcttgctggactactgtgaaatcttaagatacattgcttggattttggtcgttatcccttgaagtatgcccaaacttgccaccaagtttcatgatacagtg

SEQ ID NO: 2378 - DNA, 390 bp, Lilium asiatic
  Clone ID: LIB3229-044-P1-K1-D12
ctcactgagagccagaggcatgggaagacaggtataagcttgacgaggttgctgggccgcttgaaaaatgttcgggttatagatagaccacacggacaacattcggtggttctgacagaggatgttccgaagtatgtagattataggactgaaagagatgatttgggagtgatgcccagtagcgcaaatcagatttatctcacttttcctgctgaaagtaccttcaccgaggaagatattgcaagttatttcaagcgatatggtcctgtttgtgatgtgagggttcctcgccaagagaggaggatgtttgggtttgtaactttcctctacccggaaacagtccgacttattttgtcaaagggacatccgcactacatttgcggtgcacga

SEQ ID NO: 2379 - DNA, 394 bp, Lilium asiatic
  Clone ID: LIB3229-044-P1-K1-D2
cggacgcgtgggctgagatcagccgtctcacgcgcgtcaggatggtgtccgccgatcgggaaatggtggtctactgcttggatacccttctcgcccactacaacaacgagaatcctcctcccgccgatttcgaggatggagatcatccgttgtttgttacttggaagaaagtaatcaatggtggggagcctcgtctacgtggttgcattggaactttagaggctcgaggcctgatcactggttttcgggattatgcattaaccagtgctctaaaggatcgtcgtttctccccaattcaggccaaggaattgcaacaattggaatgtaccgtttctatactaactgattatgagtccgctcagaactaccttgattgggaggtgggaaaacatgg

SEQ ID NO: 2380 - DNA, 306 bp, Lilium asiatic
  Clone ID: LIB3229-044-P1-K1-D4
cccacgcgtccgaacaacgtgcctctctaccatgccattaagaaggatacaaagggagatgatgaggacttccttcttgcgttgatcggccatgaggaggcttgagatatctcgactgtgaccctgatgctggttagtttgtttctcttctgtgctcggggagtaataaaataatggcgttgtgttgttttccctgtacgccttttcgcatgttcaggtttctgctatgattgaacatatggtttttaagttgggaactttagttttttgcaatcataaatataagtttaatgttgaagttttttt

SEQ ID NO: 2381 - DNA, 396 bp, Lilium asiatic
  Clone ID: LIB3229-044-P1-K1-D5
cccacgcgtccggcacaatgtaggagctttggtggttgtaaaacctggaaaagaaaaatcaattgctggcattattaccgagagagattatcttaggaaaatcatcgttcagggaagatcatccaagtcaactaaagtgggggacatcatgaccgacgagaacaagctgatcactgtgacaccagacatgaaagttctgaaagcaatgcaactcatgacagataaccgcatcaggcacatcccgatcattgacaagaaggagatgatcggtatggtctccattggtgatgttgttcgagctgtggtgagtgagcatcgtgaggagctgaatcgcctgaatgcatacattcagggtggttactaggatgctcaagtctgtcagttaaagagttaaga

SEQ ID NO: 2382 - DNA, 204 bp, Lilium asiatic
  Clone ID: LIB3229-044-P1-K1-D8
atttcgtttcataaagaaatcaacttatacaagaaaaaaaaaaacttttttgattggatgggaatgaatcaaaaaaggttatatcataatcctaccatagcaaaactaaaatcttggttcttaccagaatttgtgctactttttgaaacatataaaattaaaccatggattataccaatccaatttcttcttttagattttcat

SEQ ID NO: 2383 - DNA, 186 bp, Lilium asiatic
  unsure (1)..(186): unsure at all n locations
  Clone ID: LIB3229-044-P1-K1-D9
ggggggatanagggggggtttaccaaaaaaaaaaattacgttactttgaatcaaaaccgcaattttttttttttcttgacttacaccatataacacctctcgagataacccaaccaaactggggctcattcaaacaaacaggggccctgggggaaaaaccttacctacaaaaccatgccccacacc

SEQ ID NO: 2384 - DNA, 391 bp, Lilium asiatic
  Clone ID: LIB3229-044-P1-K1-E11
tggaatcttgggagtctcttagatcaggcatcacacaacttttgaaaggaacggcaatctatattattggagatgcaactgagatcaatcagaaagttgctaccatactggctaatggtatcggatatactccactttgtactggggatttactggaaagctatgcacaccaatcaatcaattcatgggtgatttcagaaggtgcagatgcagttgctgaagcagaaggtcttgtattagaaagtcttagtagtcatgttcgtgctgttgttgcaacactgggaggagaacatggtgctgctagaaaacctgacaagtggcgttatctgcatgcaggatttaccgtttggttgtctgagtctgaagctgcagatgaagcttccgcaaaaga

SEQ ID NO: 2385 - DNA, 305 bp, Lilium asiatic
  Clone ID: LIB3229-044-P1-K1-E12
gaacatacctatatgcttgaggcatagatcgctatagctgtccgaggaggtcccgggctcaggttgggcggatgagtatccgtcgacaaggctcactgtggtaacttgcaccttctcgtgaggctacaaagatgagccaccaagaagatgatcaggagccgcatctgtctgtggatgagactcaggaggagaataactacacataggagagggaggctgatgtcaaagcatgctatacaaacaaacagagtggcaaggcatgggtcctattggagatgaagccaagggaagatgagactgacatg

SEQ ID NO: 2386 - DNA, 302 bp, Lilium asiatic
  Clone ID: LIB3229-044-P1-K1-E4
gatcggtgaagataaagaggagcaagggtgtagttaagttcaaagtgagatgctccaaatgtctttataccctatgtgtgtgtgacttttagaaagctcaccaacttaaacaatctttttccccaaggttgagtgtgccaaaactgtgaagttgtctaaagagatgttattgggtgatctcttgacatgggatgagggttttgactcttgtattactcaatttctggttggggttggtaccttggaaatgatacctactaaagaattttcttgcctaagcctatataattgctggcaatttg

SEQ ID NO: 2387 - DNA, 394 bp, Lilium asiatic
  Clone ID: LIB3229-044-P1-K1-E5
gcggagataactcaagtttctagacaacaatgtcgatgggtatgatgaagccgctgaaggctggttttgaggagcagcccgatgctcaccgcattcggattactctttcttctaagaatgtgaagaacttagagaaagtctgtgctgatctcgttcgtggtggaaaagacaaggggttgagagtgaagggacctgttaggatgcctactaaagtcttgcatatcaccacaagaaagtctccatgtggagaaggtacaaatacctgggaccgctttgaactgcgagtgcacaagagggtgatcgacctggtcagctccccagaggttgtgaagcagatcacctcaataacaattgaacctggggtcgaggtggaggtcacgatttcagactctta

SEQ ID NO: 2388 - DNA, 401 bp, Lilium asiatic
  Clone ID: LIB3229-044-P1-K1-E6
tcgctcgccacctccattcgaagcaaatcatcgatgtcgggtcgaggcaagggcgggtagggggtgggcaagggcggtgccaagcgccaccgcaaggtcctccgggacaacatccagggcatcaccaagcctgccatccgccgccttgctcgccgcggtggcgtgaagaggatcagtggcctcatctacgaggagacccgtggggtgctgaagatctttctggagaatgtcattcgcgatgccgtgacctacaccgagcacgcccgccggaagacggtgacggcgatggatgtggtgtatgcgctgaagaggcaggggaggacgctgtacggcttcggcggctgatgggtttggtcttctgcaagctttagtggtgctcgtgtctggtgtctatttcctta

SEQ ID NO: 2389 - DNA, 390 bp, Lilium asiatic
  Clone ID: LIB3229-044-P1-K1-E7
gaccttgcaggacttaaaggacagtcaaacagaaggctgatttcttttgacgaagtcaagcagcataaggcagaagaaggaagcatttggacagttttaaaggggcgtgtctacaatatctccccatatctgaaatttcaccctggaggtgcggatatgctcatgaaggcagccggaaaagattgcacatcgttgttcaataaatatcattcttgggtgaatgatgagttcttgctggaaaagtgccttgtgggtattttagaaaacagcttgtgaagaatatcgggaaacagtcaccatttgtctatcatattatgtatatggttgttgcataaaatacatgttgtttgagaaggatgaactccaagatggtataaaatgattgtaatt

SEQ ID NO: 2390 - DNA, 389 bp, Lilium asiatic
  Clone ID: LIB3229-044-P1-K1-E9
cggacgcgtgggcggacgcgtgggctccgatgaacaaggcgatagctacccaccgtgaagctctggaatacacaaaggagatgcagttccagttctgatcctcggacatgtttcggatgcgttcttaaatcgtctgtccttgaaaaggaataattgccttgtatcatactggtgctgtaagtatggtagtgctttagcaccattgtggtagagacaataacgagatgtaaccattttatgttttcctaggctattatatcctgggcctggcgtaacttccccatagttatacatgacccattttacatcagatttgaaaaaaaaaaaaaaagggggggccgttttagaggatccaggctaccttcccctgccttgcaacgtattacttt

SEQ ID NO: 2391 - DNA, 395 bp, Lilium asiatic
  Clone ID: LIB3229-044-P1-K1-F12
cccacgcgtccgcccacgcgtccggagaatctaaaataataaaattaaaagaaaagtatgataggtgttttgttggactgtcgataatatttagcacatattcaacaaaaaacatagactaaagaagtgggaacctgaacagctgccttcatggggattaaatctaaatgtcggttctctgcatgaatcttgggtttccgggatactgggttaactgtagcctctgcttccattgcaacagcttcagcaatttccatatccaagtcttgtgcattattaacactaagtctagaattttggtgataaaatattttagaaacaacaaattcttcttcactatcccctcctcttccaagataatattggatcatcacccaattggttctctcgggttt

SEQ ID NO: 2392 - DNA, 387 bp, Lilium asiatic
  Clone ID: LIB3229-044-P1-K1-F2
cgacgccgtcgtcgcccgtctcgacacccaggccaagatgcaatccatcggcaagaacatgggatccatcgtcaagtcccttgaatcctccctcgccaccgggaacctccagcgcatgtcagagaccatggatcagtttgagaaacagtttgtgaacatggaggtgcaggcggagttcatggagggggcgatggcgggatctacgagcctgtcgacgccggaaggtgaggtgaatttgctgatgcagcaggtggcggatcagcacgggctggaggtgtcggttgacctgccgcaggcatcggcgcatgcgattccagcgcgggagaaggagaaggtggatgaggatgatctgtctcgccgtcttgctgagcttaaaggcccggggta

SEQ ID NO: 2393 - DNA, 390 bp, Lilium asiatic
  Clone ID: LIB3229-044-P1-K1-F3
ctggatttatgatatttttctccaccttagggaaatttggagcgctttttgcatcaatcgcattcccgatatttgctgcgatacattgtgtggtttttgccctagtagcatcagttgggatatcatttcttcagtttacaaatatgaactgtatgagaaatctcattattattgggctctcgctttttcttgggatatcggttcctcagtatttcaatgactcgctagtttcttctggacatggcccagtaaatacacgtgcaggatggtttgatgcatttctaaacaccgtattcttgtcaccgccaaccgtgggactgatcgtcgctatcttcctggataacacactggaggtggagaagtctaaaaaggacagaggcatgccttggt

SEQ ID NO: 2394 - DNA, 402 bp, Lilium asiatic
  Clone ID: LIB3229-044-P1-K1-F4
tcgcggacgcgtgggtgaagaatgcctatcgcaagcgatggatttgagtggcttattgcttcggtactcggctcttggagatggtgaaggaatcttaaaacttgcttcacttgctaaagagcaagggaagaacaatgttgccttcctttgtctgtttatgcttggtaaattggaggactgccttcaactgttggtagagagcaaccgtatcccagaagctgcactcatggcacgatcttatcttccaagtaaagtctcagagattgtagcaatttggaaaaatgatctcaataagatcaaccccaaagcagcagagtctttggctgatcctgaagaatatcctaatttgttcgaggactgggaagttgcccttgctgtagaatctaatgttgcccatcaaag

SEQ ID NO: 2395 - DNA, 256 bp, Lilium asiatic
  Clone ID: LIB3229-044-P1-K1-F6
tcgtagatagcgagcgcgcgctctataggatccacgcttacacacgcgcgcatacgacgcgagtgatcttttatagtgtgtcggataaacaaaacactgtgcgccgttttacaccacggtgactgtgaaaaccctgtcgtgacccaactcaatctccttgcagaacatatccctttttccagatgtcgtaatatcgaagagggccgcaccgatcgcgcttttcaacacatgcgcacactctatgtggaatgtgaca

SEQ ID NO: 2396 - DNA, 299 bp, Lilium asiatic
  Clone ID: LIB3229-044-P1-K1-F7
gccgctcctctcaggcgccgttcaccccgtcgtcatggtgctccccaacgacatggatctgctcaatccgccgggcgacctcgagaagaggaggcacaagctcaagcgcctcgtgcagtctcccaactccttcttcatggatgtcaagtgtcaaggatgcttcaacataacgactgtgttcagccactcgcagactggggttgtctgcggcaactgtcagactgtgctgtgccagcccaccggcggacgtgcaaagctcactgagggatgctttttcaagccgaagaaccattgaaggt

SEQ ID NO: 2397 - DNA, 396 bp, Lilium asiatic
  Clone ID: LIB3229-044-P1-K1-G1
cggacgcgtgggcgacaataagcctgtgacgaatagtcgagatactcaggaggggaggcgcgaccaaggccttcgagtgctcaagttgtttaaagaacatgtcagtaggacttcaatattggaagactttcacttctatgaaacccggcaaaaggcgatgcaggagaaaagggcaaagcaacaccactttcagagacagattgtggaggctaagacaaccattgctgttgatgagaacaacaaggatggtgcaaccggtaaaccaagattgcagaagccattggagaaggttacagttgcgaagaaagaatctgtgcaggttggcctctcagagaggaaggcatctgatgaaaataccgtcgctgtggtagctggcaacccaccgaaggtctcaag

SEQ ID NO: 2398 - DNA, 210 bp, Lilium asiatic
  Clone ID: LIB3229-044-P1-K1-G12
tttttatttgatgttatcataaagatgcctacatttactgatcctcttgcagttgtcttgtataatacatcttaagttgtaactcctctggcagttctcttgtataatacatcttaagttgtaacttctcaggtttgtagtaacatgatatggatatgcctccaagaatactttcacctactttgtcgtgttaatgaaaatatgtatata

SEQ ID NO: 2399 - DNA, 393 bp, Lilium asiatic
  Clone ID: LIB3229-044-P1-K1-G2
gattggactatgataggcttcagttttgcccttcgcaaacacagaagaagtactttgagaggcaatttgaattagcagaggctgtgaagttgcccatgtttctgcacatgcgtgcagctgctgcggacttctgcgacattttagctcgaaacacgggcaggttcaggggtggggttgcacattcatttaccggcagtgcagaagatcgtgatcgactcctgaagtttgataatcttttcattggtattaatggttgctcttttaagacaaatgaaaatctttgagttgtcaaagacattcctgttgaaaggatgatgatagaaacagattcaccatactgggaaataaaaaatactcatgctggaagacatcttgttaaatcagtctggtctt

SEQ ID NO: 2400 - DNA, 241 bp, Lilium asiatic
  Clone ID: LIB3229-044-P1-K1-G3
aaaatatatttaggtggataatttaatatttttttgtttatgatatcaaaccaacaaaaggcaccgacctttggtgttctttgatcttctagcgttaattatatgcatcgtcaagcaaacttttcacttcatgttcgttttatttgtatgcaaccttgtttaattcatttcaagaaccttccagtggacttaaaaaaaaaaaaaaaaaaaaaaaaaattaaatatattaaaaaaaaaaata

SEQ ID NO: 2401 - DNA, 385 bp, Lilium asiatic
  Clone ID: LIB3229-044-P1-K1-G4
gcataactgagatggagaccggatccaaggccaagaagggcgccggaggccgcaagggctgtggctcaagggcgtaatcggggactcgctcagtcaaggcggggctccagttccccgtcggaaggatcggccgctacctcaagaagggccgctacgctcagcgcgtcggatctggagctccggtctacctcgctgccgtgctggagtatctcgctgccgaggttttggaattagctggaaatgcggcccgggacaacaagaagaaccggattgttcctcgacatgtgtgtctggcggtgaggaatgatgaggagcttgggaggttgttgggtggggttactattgctcatggtggagttttacccagcatcaaccctgtcctgct

SEQ ID NO: 2402 - DNA, 201 bp, Lilium asiatic
  unsure (1)..(201): unsure at all n locations
  Clone ID: LIB3229-044-P1-K1-G6
ccgannccggggcgacggcgcgttcgcccacgcgtccgcccacgcgtccgaagtattcccttagatggtcagtagtacacatggttgtacctaacacaacttgcggtctataagactttttcccaaatgtggcattgaggtttttttcccatacgagctcttaaaagttttttcatgaacatgttacttaagtacttactc

SEQ ID NO: 2403 - DNA, 388 bp, Lilium asiatic
  Clone ID: LIB3229-044-P1-K1-G7
cggacgcgtgggtagattttgggcctgatctgtgcaaccagaaggttgctgaagttgttgaaaaagaaagagtgtgtcttgctcaaaggggtgaatattctccacagattgtagtcaagccacataagttaatggtgaaaaatagttctacttctgatgtggaatccgacactagctgctggttagagaacagtgcattttcagtgaattccataattggtaaatcatctaatgagaaacttgtaattttttggattggttcaaccaatctagcagtggctgggaccttacatgctataaatttgcctgatgatgttgattgtgtgttgaactgtgatagcaaattggaagcaacttttacgtttccatctactaattcctacttgca

SEQ ID NO: 2404 - DNA, 389 bp, Lilium asiatic
  unsure (1)..(389): unsure at all n locations
  Clone ID: LIB3229-044-P1-K1-G8
caaatttcgtctcatgcgggttcacgacgtcaagaggctcagcgattgggtcgtgttctgagggcaaagggtcgacttcaagataggatggcaggaggaaaagaagagtacaatgccttcttctactcgctagtatccacggatacacaggagatgtattattcgactaaaaggcagcaatttttgatagatcaaggttatagctntaagatcatcacgagcttgccgcctcctggttcagggcctgagttgagcctctaccaccttgatgagcaactagacttactgaacaaggtcctgaatgcaggggatgttgaagctggattagagcagctggaaaaagatgctgatgatatcacgctccacaaagcccggcgttttgcagggtc

SEQ ID NO: 2405 - DNA, 390 bp, Lilium asiatic
  Clone ID: LIB3229-044-P1-K1-H1
cccacgcgtccgcccacgcgtccggtagaatagaacgttcgacctttcttgagacatggaaatctattcctgataccaatgaagtcagcaaggaccttcctgctgcagttatcaacaacgtgaatgccactgtccagcatctggccgcatctaatgtgttctttatagccaagcgaaagaacgcaaataaagaggttctctatctatcggcgaagattcctcgaggtattccgttcctgatagagctgacggtagcagttggggttcctggcataaaatgcgcggtgaagacaccgagccctgagatggctccattcttctttgaagccatggagaacctcctccattgattgttgtaggctttgcataatgtatttcattgcaaccata

SEQ ID NO: 2406 - DNA, 309 bp, Lilium asiatic
  Clone ID: LIB3229-044-P1-K1-H10
ccaaaaaatacccaaccaataagcgacataaccatacctaaacattccccaccccaaaccaacaacattcatttcaacgatagccacctgtataccaaccaaataactacacacccactctcctgaataatacatactcaacctgataccaacataactctatcacaaactgcgtcacaaaaaaaaaaaaaaaaccaaacaatccgcgacaaacaaccaaataaacttacacatccaaaaccacccaaatatctcatcaataatgccaccctaaaatcaactcaactcaccgaaaacacacaacaacct

SEQ ID NO: 2407 - DNA, 389 bp, Lilium asiatic
  Clone ID: LIB3229-044-P1-K1-H11
attgagatttgattggtttaacaatatttttgaactaaatgagttattcagatgagggttaggatcgacatgctaggattagggttacgacaaccatattatagttaagatgggaatcattttcatatttaataaacatgttgtggttagggttagccaacactaatttgtttgctagctttaaaagtgtgtatttttttattaaatataggaggtgattcacctaaaaaatagataaaagatagttattacaaataaatcgggttcttgaaaccacatctagatcatcttgtagaacagtttgaagttatggaggggaccatcaaagtacacataacttagatcacttgtgtggctatgttgagcaagcatatcgacaacacaaaatt

SEQ ID NO: 2408 - DNA, 270 bp, Lilium asiatic
  Clone ID: LIB3229-044-P1-K1-H4
gcggtggcggaagctacggtggcggcggcggcggccgtggtgtcggcggcggcggcggatgatgctacaactgtggtgagtgtggccactttgccagggaatgcccgaccaataagtgaggggagatccctatactttgctatcttattttgttgaagctttgctggatggtttgtgttttggatgttaatggtctgtctctacagtctgtcgtttggattatgggctggtgctcggtagtttggtaatggtatttcaacttggttgtga

SEQ ID NO: 2409 - DNA, 403 bp, Lilium asiatic
  Clone ID: LIB3229-044-P1-K1-H5
ccacgcgtccgcagctagtttcttcgcatcactgcccgatcgctcgccaagatgcagaatggagaggggcagatgatggatgtgtacattccgaggaaatgttcggcgacaaataggctgataaccgccaaggatcatgcggcggtccagatcaacatcgggcatctggatgagagcggcgtgtataccggccagtttactacgttcgcgctctgcggattcattcgtgctcagggtgatgccgacggtgctctggacaggctgtggcagaagaagaaagttgaagccaaacaataggagacatgcaagtctctaatgttgaagagttaaaactctgaggttgtttattatggatttagtcttgcatttactttttcagtgaaaacacaaggaaacgtgttga

SEQ ID NO: 2410 - DNA, 340 bp, Lilium asiatic
  Clone ID: LIB3229-044-P1-K1-H6
gctcagaatgaactagacgcgcccctcgtcgaaacacaattcctgctttgctgttgttgggcctgatcttggatcttaaaaatggatctgtcacttcttactcgcttggttacagctctaaattgcaactgtgaatagttgactacaaactcggcttcactagactatgtggtagaactcggaaccttgttttcactgttgaaattgatcattgtaattgaccgatggtgtattggacttggaattggtataactcgttttaacttgttgctttttgggtccgatagtgactttctcgacatttgggcttggtgacttgatattctcggtcttgatactt

SEQ ID NO: 2411 - DNA, 156 bp, Lilium asiatic
  Clone ID: LIB3229-044-P1-K1-H8
cggacgcgtggggtgtttttgtacttttgcttgggttgtgtaggggctttagggagcttcctttgtatttgatgtgtgtatcttcgtgcactttatctattttataatatgtaatgattgagttaaaatcttaacttattctatacctttttggac

SEQ ID NO: 2412 - DNA, 359 bp, Lilium asiatic
  Clone ID: LIB3229-045-P1-K1-A10
ggcttttaataccaactatagagacactggactctttggtgtttatgcagttgccaagtcggattgcttggatgatttggcatatgcaatcatgtatgagataagtaagctgtcctaccgggtttcagaagctgatgtcactcgtgctcgaaatcagctaaaatcttctcttcaactccacattgatggtactagccctgtagctgaagatattggccgtcagctccttacatacggcagaagaatcccagttgctgagctttttgctaggatagatgcagttgatgcaagtactgtcaagcgtgttgcgaaccgattcatctttgaccaggatattgcaattgctgttatgggcccaa

SEQ ID NO: 2413 - DNA, 228 bp, Lilium asiatic
  Clone ID: LIB3229-045-P1-K1-A11
gccgtgaagggggcggaggttggaattaaaggttgattctcccacagtgtggcacgcgggttctgtccgtgttgcctttatcagtctatggttatgcagttacttcgttctctggtttggttaagttgggctgtggttcggttactgaggttagattcgttctgtgaacggcaaaaattatatggtgtggtttttgatctgatctaatacattttggattccccgctt

SEQ ID NO: 2414 - DNA, 400 bp, Lilium asiatic
  Clone ID: LIB3229-045-P1-K1-A3
atgaaaacttctttcgagatcttggtggaggttgttatctctggccttctgatgagacaacccggcgctgggggcgacatgcaaccccagggagctgagtccctgctcgggtgcgatgctgtacggggctgcaccagcaggtaactgctgcagtaagctgaaggagcggcagccctgtttctgcggttacatgaaggatccaagcctgagcgggtacgtgaactcggctaacagtaggaaagtggctgctgcatgtggactcaagaacccacattgctgatctgcatgcagttccaccctgcatagcatatgcagaacgtcgacaacccttgcgctatatgctggtacgaaataaaaggcgatgttgctttcttttatagatttttatctcttttatttt

SEQ ID NO: 2415 - DNA, 363 bp, Lilium asiatic
  Clone ID: LIB3229-045-P1-K1-A5
agcgccgcctcttcaacaggttgacgtacaggagcaagcagcggaggtttctagaactcgacctggtgttggggaaatgggtggaggataacattggatcgatggacgagcccaggatccgagccctcgtcgatgtcctcgacctagagaacccagacttatggaagtggcttagcgggcaggagcagccaccagaggcagtgaacaacaatatcgtatttactgaccttcagtcgaatgtctaggaaaatctgaaccgacatgcagctccagagacccgtgcgactcctggccagccgtgggtgaggggttgggatgacaagaggggacttggaagtggtcccaagtatgggaaccagtgac

SEQ ID NO: 2416 - DNA, 231 bp, Lilium asiatic
  unsure (1)..(231): unsure at all n locations
  Clone ID: LIB3229-045-P1-K1-A6
cttgacgacacggtcatcataagaattcctacgaccatcgaataccataagctggtcggtgatattgaggacttgagaaacgggaaggtggacactgctttcataccgaagcatgagaaggatttggttgagcctcagaagnagctcgccatgccggacacctagtttggttgctaacagaaaagattttggcttgagaataatgggagcgaaagcgacttcccctcgtga

SEQ ID NO: 2417 - DNA, 106 bp, Lilium asiatic
  Clone ID: LIB3229-045-P1-K1-A7
atatcgaatatgttagagctagtttatttagagttgtaatggaccattgggaggagctttaatttctccttcagatctaagttatttctgatttgcttttcaaaaa

SEQ ID NO: 2418 - DNA, 391 bp, Lilium asiatic
  Clone ID: LIB3229-045-P1-K1-A9
cccacgcgtccgcccacgcgtccggatgtgaagcctatctacatatgatcgagtttcgcattgttgtactatggttgagttttgatgtatcctatgggcgttggtggtcttcatgctcatcatgatttggaagagccctagggggtgtggttttgagcaaccttgtaaagtttttcataccatctgttcagctgtttggagttgtcttctcgcccatttgattattgcatgattctacaggagggtgtgctaattaaacataggtcattgtatacactagacccctagatgactgttgtagggttggatcgacaacttggtatggcttgaataaggtgtgttatctgtacctgtatactttttttttatttaagaaaatgcaattgtgaac

SEQ ID NO: 2419 - DNA, 456 bp, Lilium asiatic
  Clone ID: LIB3229-045-P1-K1-B1
ctcgatcggatgtgttattgagacgggatacatcgtcatgtacctcatctatgcgccgaacaaggctaagatgtatacattcaagctctttgtgatcttagatgtgtgccttttcggatcaattgtcctactaacttatacactcacaaagggctcaaaccgcctcgaaatccttggatggatttgtgtcagcttctctgttagcgttttcgcggctcctcttagcataattaaacttgtaatcagaacaaggagcgtcgagttcatgcccttctccctctcctttttcctcaccttgagcgcagttgtttggttcacatacggcctcctcaccaaagacatctatgttgcgattccaaacatactaggcttcagcttcggagtcgctcagatggtgatttacatcatctacaaaagcagtgcaaagaagatgactatcgcgcaaggggagcgact

SEQ ID NO: 2420 - DNA, 379 bp, Lilium asiatic
  Clone ID: LIB3229-045-P1-K1-B11
cttctttttcgataaaccaaaactatgcttgctttcctctagaattgtttgtctgttcaaacttacagaagcttagaaaaccagaaatgtcaaaattaaaaaataaaacagaatagttcaagtttcttgtgaaataacatatcaatttcgataataacataattgctgaggcagtttccaacttctctgactggaggcttcaatcaatcatcatgtaaattgtagagaaattttaatttctggccatactattatgtccggaagtctgattcatgattctgcaggaacggaagtggctcagcttatatgtggctgttgccggacaatgctcatgcatgctcgtggtgccttgaatgtgaaatgtccctgttgtgataca

SEQ ID NO: 2421 - DNA, 422 bp, Lilium asiatic
  Clone ID: LIB3229-045-P1-K1-B2
gctggcggagctcagcagtaggattcagctcaaagctgaaggggaggaaaaggggcatgccttccatccagtggctacaattctcagttacctgaccaaggcccctcttgttcccccgggtactccagtggtgaatgcattgtcgaagcagagggcgatgctagagaacatcatgagggcttgcatcggattggcgccggagaacaacatgatcttagagtacaagtgagatgagttctaaccgagttgggagcggttggggaaagtttaggaagggaaagggcaaggcttatcttttttttcttcagtttattggtaggagtttgtatggttaggactgagtacctggctgtctctatgtgtttgtgttgtgttggacatgttggggttatattaagttatatgaagatctagttcttgct

SEQ ID NO: 2422 - DNA, 415 bp, Lilium asiatic
  Clone ID: LIB3229-045-P1-K1-B6
gagagataacctttgaaatatccattgtatatactattagaaagcacatgcatggtcggctggacctgttggtgtgaataattatacggcctacgtgttgctactagtcattcggagttccttggagctcggcagattccacggtgcctggtaaagctgaattgaatttcaaccgctttgatgtctagacagtagtgcgatacatctacattatgttctctggctcagaatttcagaaagttgtagatgatcaggagatcatggacttggtcgatccgtcgactcctctgccttcatggttctcagaagaagaccttgctgtttatgcttcactagatgagaagtctggatttcactttccgatgcttgctccgtatcagaagtggaaagagtcctctgatgtgatcgcaaatgt

SEQ ID NO: 2423 - DNA, 461 bp, Lilium asiatic
  Clone ID: LIB3229-045-P1-K1-B7
gcgcttcagacaaacacctctgtgaaagctggcccatctgaactagcgaggaagggtaagatcttagtgtcgagagcgtataaagaaactcaacatcctatcaaggaagaggacagtcttgcttctgtagttcgagacatctgggatgataagagttctgttactggtaaggggaaaatgaaaagtgcttctattatcccagctgttgaagtggaaccaccaggatgttcattcaatcctccatttgaagctcatcaagattcattggctaaagcggttgctgatgaaacgcaaatgatgtatacaaaagaattgggaccacaaccagtaccacttatagctcctggtgaacttatcagtgaagaagatattcatttcgttgtagtgtattgtggaaacgaagatgataatatcgatgagagatgcctatgctaatgatggtggaaatgaggatgatatgg

SEQ ID NO: 2424 - DNA, 455 bp, Lilium asiatic
  unsure (1)..(455): unsure at all n locations
  Clone ID: LIB3229-045-P1-K1-B8
cggaacttgactggtatttggaacttcaccaataccggtgttgtgagccacaaggagatactagagatgtataagagctacatcaaccccaagtttaactgggtcaactttacgcttgaagagcaggccaaggttatcgtcgcacctcgcagcaacaatgagatggatgcttctaaattgaagaaagagtttcctgagctgctttctatcaaggagtcgctgatcaagtatgttttcgagcccaacaaggtctgaatttgaggtggagctaaactgtctgtcttgatgtaactgtagtagcatcctcccaacctcccaatccagtagtagggggttactgatgttgtatgccagcatgatagcttctagttgttatatttaattgtatcgagctttagctntatttattctccgtcgcatgctactgtcaagttatcagttttactctgttttta

SEQ ID NO: 2425 - DNA, 452 bp, Lilium asiatic
  Clone ID: LIB3229-045-P1-K1-B9
cctgaactacccagacatgcctgaagcaatggtgcaccatggattctatgctggggaccataacacatctatccgtcccggtattctaggtgctgttcaaatgattagagaagtatatggagatcttcggataatggttacagggcattcaatgggaggggctatggcttccttttgtgcacttgatctagctgtcaatcacagactggatgatgttcaacttatgacatttgggcaaccacgcatcggcaacgctgtatttgcatcatacttccgcaagcatgtaccacatgcggttcgggtgacccatgagcatgatatggtgccacatctgcccccatactactaccattttccccagaagacgtatcatcacttctccagagaggtgtggctccacaacgcaggggtaggaagcctagtctacatgatcgaggaaatctgcgatgatt

SEQ ID NO: 2426 - DNA, 432 bp, Lilium asiatic
  Clone ID: LIB3229-045-P1-K1-C1
gtagaatgggatgcagttgaattaccttctcagttcatggaaaattggtgttatgagagggatacacttatgaggattgcaaaacattatgaaacaggtgaatctcttccggaggaagtatatctcaaacttcttgctgcaaaaacttttcgtgctgggtctttgagcctgcggcagttacgattcgctaccgtagatttggaattgcatacaacatttattcctgatggaccggaatctatatttgatgtcgatcgaagagtaggagaaagaacacaagtcatccccgtcctacctgaggatagattcctttgcagtttcagccatatatttggaggtggctatgcggctgggtattatagctacaaatgggcaaaagttttgtcggctgacgctttctccgcatttgaggatgctgggttggacaatgat

SEQ ID NO: 2427 - DNA, 382 bp, Lilium asiatic
  Clone ID: LIB3229-045-P1-K1-C10
ctgaaagatagtacaaggcgggtgtatctcgagagatatctccagatgatgaaggtcagttcatggtgcaatttatgggcagtacaagcttgggtcagtaatgatgatgaagtagagcatggggagcaagctccaagctagcgaggcaggggagatacagagctagtatatgggtagtagcaggcttctcccaagtattgaaagtaggcaggctgtaaattataagaggaatggaaagttaggtgtgggcaagctttaataagagatagtctccttcgagctggaggcactgcatgatggggagtacaaattcattagcaaatagttttggtatcattgttaagactactagaaccacccctataatccattgtgatgatgt

SEQ ID NO: 2428 - DNA, 441 bp, Lilium asiatic
  Clone ID: LIB3229-045-P1-K1-C11
cagagttagcatcttgtggccttgatgttcaccagctaaaccgaccagacagagtacaggatacttgatggcatgacaaagttaatcctgtcaagggtggaatcgtgttctctaatatagttacaacagtatccccaacctatgctcaagaggtgcgcactattgagggaggtcatggtctccacagcatactgaatcttcactgtaggaaatttgttggaattcttaacggaattgataccgatatatggaatccttcaactgatgcttttcttaaagctcagtacaatgctgaagatcttcagggaaaggcagagaataaatcttttatgagaaaacatcttgagctttcttctgctgatgccatgcaacctttggtttggtgcattacacgactggtaccacattatggtgtgcatcttatcaggcatgcattgtatc

SEQ ID NO: 2429 - DNA, 432 bp, Lilium asiatic
  unsure (1)..(432): unsure at all n locations
  Clone ID: LIB3229-045-P1-K1-C12
ctccaaattcctctgatggcgcccaagtccgagaagaagcccgcggagaagaaggcggtggcggagaagcctgcggaggaaganaanaaagcggccccagccgagaagaagccggcggagaagaagcccaaagccgggaagaaggtcccggcggcatccaaggagggggagaagaagaagaagaggtcgaagaagtcggtggagacctacaagatctacatcttcaaggtgctgaagcaggtccaccccgacatcgggatctccagcaaggccatggggatcatgaacagcttcatcaacgacctcttcgagaagatggcacaagaatccgcccgccttgcccgctacaacaagaagaacaccatcacctctcgcgagatccagacctctgtccgccttgtcctccctggcgagctcgccaagcacgccgtc

SEQ ID NO: 2430 - DNA, 548 bp, Lilium asiatic
  unsure (1)..(548): unsure at all n locations
  Clone ID: LIB3229-045-P1-K1-C3
gcagacccatcgcagtccgtcccaatatcccgataatcccatcttccatccatcatctttctccatcttcatatcataaagaggtaaaaggagtgtcnnncaatttctatatatagtgttggatgtttagattagcgtctttcaagaatttaggtagatttcattaccatatttcggagcctatataaaagatagaatagactatagcgaataggatgaagaggagtctcttcttctcatatccaggagagtctcttcatcttcgaggatttcattaggagagaaggggcatagagttcacaccaatattcgggagaaggatgttgaagctttttctttcatcatacctcataagagtagcaagaaatcacctccggtcttcccaccgtagttaaagatagaggagcttggatgcccttacaaagaatcccaattcatggatgttgttagttcaaatttaaaatttcatatagtttgttaggggttaagaggttggtgtagagatttcaagagttattatcaaagtttcaaatttcatcattgaagtg

SEQ ID NO: 2431 - DNA, 450 bp, Lilium asiatic
  unsure (1)..(450): unsure at all n locations
  Clone ID: LIB3229-045-P1-K1-C4
cccacgcgtncggtcactggcccctttaaagtcaatggtgttcctcttcgtcgagagagatcaagcttatgtaattggaacctcaaccaaagttgatataagtggagtcaatgttgagaaatttgatgacaagtacttcggaaaggagggcaagaagaagaacaagaaggtggagggtgagttttttgaggctgagaaagaggagaagaaaccagtttcccaagaaaagaaggatgatcaaaaggctgtggatgctgaattgattaaagccattgaggcagtcccagacctgaaaacttacttaagtgccaggttctcccttaagtcaaggatgaagcctcatgagcttgtcttttagatttcaagagaattgtccctgtccctgtgcctgtgttcgtaagttttgactgaggtagttgaattttgagctaaagcttgtttaaagtctac

SEQ ID NO: 2432 - DNA, 453 bp, Lilium asiatic
  unsure (1)..(453): unsure at all n locations
  Clone ID: LIB3229-045-P1-K1-C5
cgtcaaggacggcttcgtcatccgcaagccccagaagatccactcccnatcccgagcgaggcgtgctctcgtagccaagcgcaagggccgtcactccggatacggaaagcgcaagggaacgagggaggcgaggttgccgactaagattatttggatgaggaggatgagggttttgcgccgcctgctgcgcaagtaccgtgagtcgaagaagattgacaagcatatgtatcatgatatgtatatgaagggtaaaggtaacgtgtttaagaataagagggtgctgatggagagcatccacaagtcgaaggctgaaaaagcgagggagaagacgctgcatgaccagtttgaggctaagcgtgctaagagcaaagcgaggtaggagaggaagcatgcacggagggaggagcgactcgcccatggcccagttgaacgagtacctgcaccagtagcagg

SEQ ID NO: 2433 - DNA, 297 bp, Lilium asiatic
  Clone ID: LIB3229-045-P1-K1-C7
tgcgatgaagtggttccaggtcttgttcgagggtgtcatcctcaacaagtgcggggatatcacctgttaggctctgctgccctttgtcctctctttcatcttgaagttgttcaatctgttttattagcagtgtcaggatatcttttttccgcgagaatttttgttatgacctgagttttgatttgaagtattctgagtttatggtagttctgggtttatgaaaaggtacttttgtaaggataatggtggctcgtaagctgcttggtgaatgccagatttagatctaatcctggcggg

SEQ ID NO: 2434 - DNA, 436 bp, Lilium asiatic
  Clone ID: LIB3229-045-P1-K1-C8
ggagcggcggagttcaagcaatcctacggcggcgctgatggcggagcacgtaggggagccggaggttgtggtgcaggatcgggagtcccttctgggcaagatctcggagaagatccacggccacgattcgtcttcgtcgtcttcctccgattcggaggatgagaagaagccggaggtgtccgcggcggcggagatcaagtcgaagatcttccgcatttttggaagggagaagccgattcatcacgtgcttggcggcggaaaacctgctgatatattcctatggagggacaagaaagtctctgctggtgtgcttggtggtgtaacggccatttgggtcctgtttgatctgctggactaccatctgctcactctggtgtgccactgcctcatccttatgctggccatcctgtttctctggtccaatgctaccactttt

SEQ ID NO: 2435 - DNA, 396 bp, Lilium asiatic
  Clone ID: LIB3229-045-P1-K1-D11
cgctaccaaagccgctcgcaagtcctccccggccgtcggcggcttgaaggagaggcaccgctaccgggcggtcagggtcgcgctgcgtgagatccgcaagtaccagaagaccaccgagctgctcatcaagaagcttccctttcagcgcctcgtgagggagatcgcgcatgactttcagacggatctccggttccagagctaggcggtttcagcgctgcaagaggtggcggaggcgtacctggttagtttatttgaggacaccaacctttgtgctattcatgctaagagggttacgatcatgcccaaagatatgcagcttgctcgccggattcgtggggaacgtctctgaagtcatctgcttggttcaatcggtttttagagtggtttgatgtaaac

SEQ ID NO: 2436 - DNA, 341 bp, Lilium asiatic
  Clone ID: LIB3229-045-P1-K1-D12
ctcctccctccgatggtgggtcgccagtatggaagctcgacagctccgagcccggcggccaacgatatgtgacactaaacgggtctccacataacgagatcaacatggacaactggttcaaaattgaaaaagcaggttctttgggctacaaactgctatactgccccagcgtagccggcgtccctgccgatggtccttgcggtaatctgggtatatacttcgagaatgggaacaggtggttggttctgaacgaccaaccctttttcgttgtctttgtcaaaacacaaaccctcacggatatccccagccgtacctggattcccatgaaataaaggttttat

SEQ ID NO: 2437 - DNA, 145 bp, Lilium asiatic
  Clone ID: LIB3229-045-P1-K1-D2
tgtgtatattgagagtataagagcattctataggaaattaaactttttcattaggcagtttagagagcttgatttggcagatgttaagttgtgacagagtagagaacctcacattttgttcgtaatcagacattgataatttttc

SEQ ID NO: 2438 - DNA, 455 bp, Lilium asiatic
  Clone ID: LIB3229-045-P1-K1-D3
gttttgccgccgtcgccgttgctgccaccgtagctcgttgcagcctaaggacgggggggagctaattgactctggagaaaatggcccctcccgcgaaagttgccaagaagcctgatggtaaagcacaagcattgaaagttgctaaggctgtgaaatctggtgcttcaaccctgcaaaagaaggccaagaagatccgcacatcggtgacctttcatcgtcccaagaccctgaagaaagatagaaaccccaagtaccccagaatcagtgcccctccaaggaacaagctagatcactaccagatcctcatagtatccactgaccactgagtctgccatgaaaaagattgaagacaacaacactcttgttttcattgttgacatccgagctgacaagaagaagattaaagctgctgtgaagaagatgtatgatattcagacaaaaaaagtgaacaccct

SEQ ID NO: 2439 - DNA, 458 bp, Lilium asiatic
  Clone ID: LIB3229-045-P1-K1-D4
gcgtccgcgaggaccagctgtataacttcgttgtaacaggggcactttctgagctgattagggggttctctcgagagggtggcaggaaaggaatatgtccaacacaagatgatcgagaaggcacccgaaatttggagtgtcatctcccagggtgggtacatctatgtctgtggtgatgccaaaagcatggctaaagacgtgcacagagttcttcatacaatatcccaagagcagggatccctcgataattcgaagactgagagcatgattaatggcttgcaaatggatgggagatatctccgtgatgtgtggtaaggaagaaactcatactctcccagaaatctcatgagccagaaggttttactgaattgagctcctaaatgtgtgcctctcggcttaaaaagttatggtatatgattcttttagtcagaggaacagttttggtactgagatatacc

SEQ ID NO: 2440 - DNA, 344 bp, Lilium asiatic
  unsure (1)..(344): unsure at all n locations
  Clone ID: LIB3229-045-P1-K1-D7
cccacgcgtccgcttccatcacccctttcttctgcctctatttccaatacggggtggattgccggcggtgaggagtacncccagatctcccactcccgccggcgcggctgccggaaatccggactccggcgacggtgtgtggcgacggtgaagcagcagaagacccgattctacatcctctgccgctgctgtctccatgtcgctctgctggaactctaatgaggagtgatctgatgctgtattcatcgattgattagcttcgaagccattcggcggttggaatttgtgtgaaatcggccacgccggctattcacatcacgccgtggttgaccgagcataaactg

SEQ ID NO: 2441 - DNA, 443 bp, Lilium asiatic
  Clone ID: LIB3229-045-P1-K1-D9
gcctattgctgctattggcattgagatatggacgatgcaagatggtattggaggggacaatattttgattgcggatgatgagaaagttgcagcctcgtaccgtgagaagttctggaagccaaagtatgatgtggagaaagaaaagcagaaggctgaagaagaagctgctggtttttcagaggggcttgcaagctttcagaaaaaggtatttgatgtcctttataaagtagctgacattccctttttggcgccatacaagagtaagatcatggaagtgattgagaagggcgagacccaacctaatttgaccattggaatcctggtgtctattgtgatgggtcttttgacagtaagtttcaagatcctctttggtggaaagaaaaaacccgtggctcctgctaaaccaagtgttgaaacttaagctgcagaggtctctgaaactg

SEQ ID NO: 2442 - DNA, 435 bp, Lilium asiatic
  Clone ID: LIB3229-045-P1-K1-E11
cggcggcgaagcgaataagatgatcatcccggtccgctgcttcacctgtggaaaggtgatcggtaacaaatgggacacgtatctcgatctcctccaagcggattacactgagggggatgctctggatgcgttaggcctggttcgctactgctgcaagcgaatgctcatgactcatgttgaccttattgagaagcttctgaactacaacacccttgagaaaacggaggcgatgatgagttgaggggcaatggagatcccatatactgaagtttgttatggcaagttgttagctatccatttagtgtcaactgttttgtggtgtgaagacattataatgaaacttctggtggcttgtgggtcagaatgtatgtgaactttaatctcatcagttaaaactgttcggatatttttctgaatataaataaaataaatatt

SEQ ID NO: 2443 - DNA, 430 bp, Lilium asiatic
  unsure (1)..(430): unsure at all n locations
  Clone ID: LIB3229-045-P1-K1-E12
gtcgtgttcgggctgttgaactcgctgtttgaaggccgcgcggtggcgagaggggccgttcttgccgatcgcggtgcgtgcagaanatgagccacagggggttgtcggggtcggatccgactgattgctccatggcgtttttgtacttgctgtgttctgttagtattcgcactaatctgcagaagtttctcgggtttgcgccgccgcgggctgcggcgggggctgggctgttccctatgccggatgccaagaccagctgatgtggatacagtgttttagcgtgaagcaatggtatgagtcggcaagtcttactacacataactgagggagtataaaaactgagcgggttcttatattttcttctgtagacctcaacaattagattttgcaagaggctttcttatttctgagtattttaaaaccgggaaca

SEQ ID NO: 2444 - DNA, 356 bp, Lilium asiatic
  Clone ID: LIB3229-045-P1-K1-E4
gggctgcttacgaggagtctggaggtaggccggagagcgaatccctttgcagcagtagctgtgaggatgtatctgggagatgtcagggatgttcaggctaaagctcgcgggattccgtatgcgaagaagaagcgaaagcgggccgccagcaaaggcagcggcagcggcccaggggagtcttctggaggtgctggagaggctggaacttcaagtggtcatggttctcccgcttcaagctgagtacaacttcaattattctctctctctactagagcagaactctaatatatttttggtctttgattctaaccttggatcttattatttggtggttgatgagttggtaacagcatata

SEQ ID NO: 2445 - DNA, 354 bp, Lilium asiatic
  Clone ID: LIB3229-045-P1-K1-E8
taaaaatgcacacaagaagaagcctttaaaggtgttaggtttatttggagggagagaggataagagtgtaagtagtgatggcccaccttcaaaggcagggatactgtgaaacatgcaaaacttatacgagactgttaagaaagctcagatggtggtgcaagttgaagctgttcgtatccaaaaagagcttgctgcagcagagtttgatggtactgcgaaggagaactaatcaaagtaacacttactggaaaccagcaacctttgcgaactgaattcacgaaggctgcattggacctgggctctaagaagctctctttggtgttaactgaagcatacaaagatgcgcatcaaaaa

SEQ ID NO: 2446 - DNA, 410 bp, Lilium asiatic
  unsure (1)..(410): unsure at all n locations
  Clone ID: LIB3229-045-P1-K1-E9
ctgggtagttgcaagccgcccacatcgtttggcttcacgtatgtgaatgagacagtgtggtatacaacgttatgggagattnncagcgatctcgactgctcgaggtggagcaacgatcaacaagcactatgcttccagtgcgactcatgcaaagctggagttctcgccagcatcaagcacagttggagaaaggtctctgtgatcaacatcgtggtactcatcatcctcgtaattatctatattgttggatgcactgctttcaagaacaatcggaagatcgacaatgattagcctttctgagaagctaggatgacaaaatctctgcctatccagattcagttttagttgagaattggtagttattgatatacagcttgtatactaaacatcaattagttgtgtgttttatc

SEQ ID NO: 2447 - DNA, 379 bp, Lilium asiatic
  unsure (1)..(379): unsure at all n locations
  Clone ID: LIB3229-045-P1-K1-F1
ctgggtgttgcaagccgcccacatatttttgcttagagccagantnccacagagtgtgttttaaacctttatgaggctcttctttccccaaattgtaatttttggattctccaactccttatccctccttggaattaaggggaaggttaatgtcgagattattccaaatgatccaaaaaatgggaagccattggctgctaggtttcagtccaagtccaattttggtgcaccaacgaagaacccaactgatacaaaaaaaaagccttaacttgcttctagagtgctaaaatcccctgtgcctatgccatcatcgcaaaagatggaaaaacacataaagaaagatcttgatgattcttatgatgacaaaactttggttgct

SEQ ID NO: 2448 - DNA, 429 bp, Lilium asiatic
  Clone ID: LIB3229-045-P1-K1-F10
caaaatccgattcgatctgtctcatcatcaccgccgcccccaacaaaacgcgagagtcttcgccgccgagtttggtctcccccatccgtcctcaacacgccgccggcgagatgtcgtacgacgacgttgagatcgaggacatggagtggagcgacgagattcaagcgttcacgtacccctgcccctgcggcgacctgttccagatcaccaaggaggagctccgcgccggcgaggagatcgcccggtgccctagctgctccctttatatcactgtcatctacaaccaggaggacttcgccggcgatcccaaggggaagggcgctgtcgatacctgcaagcagacgcagccagtcgccgtcgcgtgagtcgatgccggacggatcagagtggggatgagagtttggcctgctaaagagaaatgctggtgaa

SEQ ID NO: 2449 - DNA, 336 bp, Lilium asiatic
  Clone ID: LIB3229-045-P1-K1-F11
gaacgacatcagcccgaaaagtaggaggaatgaaaactgaaagtataatggcacgagtgatgtcaagaatgtgatgatgtttgcactcagcgacaccattatgctcatgggtgtacgaatatgactgctgaaagagtgtcatgagatgagtataatatgcatgcaataagtactcatgagcagagtcgggtctgaatatcttgatctgaggttgaaactgggtatgaaacatacatagcagggaagtctcgtagactcgaggaatctaataactctgttgaagcaagtatacccatgtatatcaagaaaaatcatcaatacaactcacatagtaac

SEQ ID NO: 2450 - DNA, 444 bp, Lilium asiatic
  Clone ID: LIB3229-045-P1-K1-F12
gttacactatatttgacatgtattataaaataatttgtcacccaattatggagggttggttatattgagcggatgagatgcatattaaaataaagatactagtatatgtacctaaaaaaacatagattcactttactttactctatgcatatattagttgaaaacatgttccatatatcatggacgggtcagcttcgacgactatcataccacaccataaaaggaagggacatagaaatatatttccttatgaaacacaaatgagaataattaacacttaaacacttaatgttgctatgtatacaaaataagtgataaataatattgtaacaaaaaaatacacttaattaactccttgcataaaattagaaaaacttggaacattgtactatcatttactataatgatcacagacgttatttgattcgtgtaacttaaatttat

SEQ ID NO: 2451 - DNA, 223 bp, Lilium asiatic
  unsure (1)..(223): unsure at all n locations
  Clone ID: LIB3229-045-P1-K1-F2
gcccaacggccaacgatatgtgacacttatcgggtctccgcataacgaantcaaggacgtttacatgttcattattgagaaagcaggtgctttgggctacaaactgctatactgccccagtgtagccggcgtccctgccgatggtccttgcggtagtctgggtatatacttcgaggatgggaacaggtggttggttctgagcgaccagccgttcttcgttgtc

SEQ ID NO: 2452 - DNA, 452 bp, Lilium asiatic
  Clone ID: LIB3229-045-P1-K1-F3
cccacgcgtccgctaggatgtggcatcgacaatctgttgttgtcagcaatttcagacacatcatgacgattttgtgtacttcaacgtgcatgacattgaagacatccatctattatattcgctttgtatagttgttacaacaactcaagagaaattaaagtaaaatggataggaatcatgaaatttggataatagatgaagaaaaatatgaatccaaaagaaaactgcctcccatgacagctggaacattggccatttctcagtacatgacatctcacagaaatatgttgccagggcggcctccctcgtgcggagtctgcacgggtattcacttgtatttatttacagaaattgttgcccatgattggtagagacggcagacatcaggcatcaaatactattagagatgaacttacgctgtctttaaaagtgtgtacatgcaacaaatgaaa

SEQ ID NO: 2453 - DNA, 410 bp, Lilium asiatic
  Clone ID: LIB3229-045-P1-K1-F5
cgtccgataataacctaggtccttataaggagatgagttattttctataccaggtagctagcataggctagaggtagagcgtcgtagtcgtagagtatgctttaggtcaagtccctataaccgaagcgaataccctcagttttgtgtgtgctgagacatgtggcctaagagatcaatagtgccaccgaagttctgccgaggatgccgagtagtgagcagctactatctttatttttttgccagcacctcattctttcagcaaagaaaggatgccggtgccttatcagcaagcactatgtcagacactctacttacacaataacacctacctatcaagacttcacatccatatgcttgaacaaggtcgagggctccggcgtgcttaaagcgatccgaccagtggtcacact

SEQ ID NO: 2454 - DNA, 412 bp, Lilium asiatic
  Clone ID: LIB3229-045-P1-K1-F6
ttcttgttaaaaaaagatggtgggtggaggttttgtgtcgattatacggcttaggatggaattacttgcgggtgggtggccaattcctattattgatgaattacttgatgagttaggaggaacatggttcgaaagccaagtcggtttaacataggagaaataaacccaaccaagggtggatgaaacagaaatcaggttcaaacccttcgaaaaatcggaaaggaactcgacccaacaagaaggcaaaaaaggggtctggtaattgagttgcttgtaatttttttgacttggaggtattttataagactgaaatgtgtctgaaaatgctcatatacctaatgaatttgttgtttgtgagttgggacgagaactctgggattttgacactaccctattggagtatttaacaaaa

SEQ ID NO: 2455 - DNA, 278 bp, Lilium asiatic
  unsure (1)..(278): unsure at all n locations
  Clone ID: LIB3229-045-P1-K1-F7
ccacgcgtccggtcccggtctctttttagggggcctctgagaagaanaagaatgagtctaagaagtcggtggagacctacaanatctacatcttcaaggtgttgaagcaggtccaccctgacatcgggatctccagcaaggccatggggatcatgaacagcttcatcaacgatctctttgagaagatggctcaagagtcggcccgccttgctcgctacaacaagaagaacaccatcacctctcgggagattcatacttccgtccgcctcgttcttccc

SEQ ID NO: 2456 - DNA, 201 bp, Lilium asiatic
  Clone ID: LIB3229-045-P1-K1-F9
gttctaagaattttaagaagatttgtggtgtatgctgaaagagtcgtttagtttgatgctaagtgggggtttctaatttcttacgaggatgaatgggaattacattgtcgcgaattattcctattcttgatttcttgattaacagtcttcacttgatgaatacctcaagaaccaattcagtgacaatcatttaaccacacc

SEQ ID NO: 2457 - DNA, 444 bp, Lilium asiatic
  Clone ID: LIB3229-045-P1-K1-G1
cccacgcgtccgcttttctccacctttctttctccctttctccccaaccccagaggggctccaccgtcgtgccaggggtccctcctcttggaccacccccagatgcggcagagaagatgcaagcgctcagcaccgtcgaacctgagatcaacgctcacgagctcctccttctctctctctatctcattgctttccttttggaaattaaatctcgagcttacatttgtctcccccctgcaggaattgcatgaaggacggtggagatttcacgcatgcgagcaaaagctatcaagcaaggaaggaaacgatcatgcacggagggccgagatctgaagaagatgctggatggctctgatgaagtgaaggtacgatgtgcagttctgatctgacggcgaataggatagccgtgcatggagcttctagaggcgcatgtggaaggagctc

SEQ ID NO: 2458 - DNA, 140 bp, Lilium asiatic
  Clone ID: LIB3229-045-P1-K1-G10
cccacgcgtccgagtttctatgccattctacaaacaagggaaaatttggccaggaaaattttttagtggtaaaattatgtatggatgggggtttgaatttcatattcctttgatgaggagagaatttattgttttttgag

SEQ ID NO: 2459 - DNA, 442 bp, Lilium asiatic
  Clone ID: LIB3229-045-P1-K1-G11
atccctttctcccatctcagaatcaaagaagagaaggaaagatgcctctgaagagggtggactcgatagtctctgatttcgaggagaaactgaaatcagaggacgcaaaagtgaaattcctgctcttcttggccgataaagatccttcaacatcgcgcagctggtgcccagattgtgttgttgccgagcctgtaatatatgaaaagctgggagcaacttcggacgaagtgatacttctacgagcgtatgttggagacaggcctacatggagaaatcctagccatccatggagagttgatccccgattcaagctcaagggggttcctacactcatccgatgggagaacgacacaatcactggacgtctggaagaccatgaagctcatattggagagaaaatcgattcccttctggtcagcaaataattttttcagtttccctg

SEQ ID NO: 2460 - DNA, 362 bp, Lilium asiatic
  Clone ID: LIB3229-045-P1-K1-G2
gaaaagatttggcatcacactttctacaactagcttcgagtcgccccagaagaggacggtgtactgctgactgtagcggctctcaaccccaaagcaaacagggagaagatgacccaaatcatgtttgagaccttcaactgccctgccatgtacgtcgctatccaggctgttctctccctgtacgcaagtggccgtaccaccggtatcgttctagattccagtgatggtgtgagccacacagttccaatttacgagggatatgccctccctcacaccatccttcgtcttgatcttgctggccgagatctcacagatgcattgatgaaaaaacttaccgagagagggttttcattcacaaccac

SEQ ID NO: 2461 - DNA, 448 bp, Lilium asiatic
  Clone ID: LIB3229-045-P1-K1-G3
cggctgaagtgctggagctggcggagaacgcgagtaaagatctgaaagtgaagagagtgaacgccaaagcatctgcagctggcgatccgtggggatgaggagctggatacgctgatcaaagagactattgctggcggtggtgtgattccgcacatccataagtctctgatcaacaaatctgcgaaggagtgaactttggtgggtggatctagttgggtgtcttagttatgtgtaggtgtatctgaggttagagcctgtttctgttatgggttgttggttgtgttggatatgatgaattgtggtcgtttaatttgtatggagacttggtttaatggtgctagttggttaaaattgtgaattctggagtattgttggggttagatttagtactgggagttgatgtaatctgtggaaaaccatctgggtttagtgaatcaagtttatggag

SEQ ID NO: 2462 - DNA, 263 bp, Lilium asiatic
  Clone ID: LIB3229-045-P1-K1-G4
tggagagtggtggctgtggctacagcatccttagcggcggtggttcgcctgacggcaggtggaggagctgatcatgttgctgctatctttttcttaggtcttgagctgttggtttgaatttgtcttgctttgttaaattagttgcggtctgctgctgagtatagtctcgatatgtctcgaacgagaacctggaagaatatggtgtggtttttgacctggtgaactgaaacaaatctaggttgcgtgaatcttgattcgatctt

SEQ ID NO: 2463 - DNA, 431 bp, Lilium asiatic
  Clone ID: LIB3229-045-P1-K1-G5
gtttgttgaacacacactctcccttactgtttccctatgtggttttaggtttgggtgggcccatttggataatgggcagctgctaattaaatccgagcccggtgaagttgtcaagcctgatcaattcaaggcaataaatgatgagggtatgccaatgtatcagaggcccttcatgagggggaagctttacatccacttcacagttgacttccctgactcactgacgcctgaccaggttaaggctcttgagagtgtgctgccgtcgagggctgcatcacagctgactgatatggagttggatgaatgtgaggagacaactatgcatgatgtcaacattgaggatgagatgatgaggaagcagtcccaggctcaagaggcttatgatgaagatgaggacatgccgggaggtgctcaaagggtgcaatgtgctc

SEQ ID NO: 2464 - DNA, 105 bp, Lilium asiatic
  Clone ID: LIB3229-045-P1-K1-G6
agagtaggatcgtaatcgatgaacgattgatctttacaactgtaatattagtttctgtttgtgtaaatggttgaggatgctaaattggaccgttgtatgcatatt

SEQ ID NO: 2465 - DNA, 392 bp, Lilium asiatic
  Clone ID: LIB3229-045-P1-K1-G9
gaaaggcaaggcaaaccgttctatttcgcattccaaataccatgctagactagtttgagttcaagtaaaacattaaacagtctagtatccttcaacatacaataagcactggattcctccataacatgtgggcaatgattccctcatggcgcacaacatgaactgttgttcactacactgaactgcaccatttcttatcgacccatcaaatgcaaaccaagaatagacctacgagaacgatgtgaaatcatcaggccgctcaatgtgtgcttcctcgaactcatcgtcatcttttttcagggtcaaagccacaatggcgttattttcaactttctgctccgccaaagtttttgaatcatccaatatcaaattggtttccacatatattaaac

SEQ ID NO: 2466 - DNA, 359 bp, Lilium asiatic
  unsure (1)..(359): unsure at all n locations
  Clone ID: LIB3229-045-P1-K1-H10
cttctttggtaacgatgtctttttgttgtggtggaaagtgtggctgcgggtggggctgcaagtgtggcagtgggtgcaatggatgtggnatgtatcctgacttggctgaggggagcactgcctctaccactatgatcatggggtttgctcctgccaagggggagtttgagggagttgagatgtatgctgagaatggtggctgaggctgcaaatgtggtgataactgcaactgcaacccctgcaagtgtggcaagtgatctcttcatagagaagaggatgtaaggtttgataccctttgtttacttgtttctgctgtagtgctgaataatggccctgggtttatatgatacaaagctttt

SEQ ID NO: 2467 - DNA, 369 bp, Lilium asiatic
  Clone ID: LIB3229-045-P1-K1-H12
cccacacgttcgcccacgcgttcttttatatataattggcaacccaaagggcgaggctcccaccaatgtggggtgctggggagggttagatgtacgcacatgcatagagctgattccggattcgaacatgagaactccaggtcatgactttgcgaatcataaactcgaaccggtaagtggggtgggtcttggtgagaaaatgaacgatcttctcagtggaacctatggctcagtggggatgtgaggaagccgtactgaggagaaagtgatgcatgcccaaatgatcatcggtctttatgtgctcgcaatagcgcatttgttgtcgcaaaacatattattcaagtactgattgtgtatgctgaaattcgc

SEQ ID NO: 2468 - DNA, 310 bp, Lilium asiatic
  unsure (1)..(310): unsure at all n locations
  Clone ID: LIB3229-045-P1-K1-H4
cccacgcgtncggcgaagaagattttttttgtattaaagagagcaaaaacactgagtagttgcaggatgtattccgtagtggaatcacnncncgtttnacatcacattcacgaaattgttggaaattgatctatggatgttgcaaaggcagaattttggaccttctgttcttgtgaccgaatttcgagcctcttaacgtctgaatatgtaaattcgtatatcatttttatactaatctaaaagctcatacggcggtcgatctagatgatccaagcttactttcgcgttcattcgacgccttagctatttt

SEQ ID NO: 2469 - DNA, 365 bp, Lilium asiatic
  unsure (1)..(365): unsure at all n locations
  Clone ID: LIB3229-045-P1-K1-H6
ggccagacaagtttcatggtagtcatcctcatccttgaaaggcttatanaaaatgttggagaattataagctccgttgcaggaaattcatgatttgcatggtcaaaggattttctactcaaaacgtctcctcttctttcatcttgggcgtctgccatgttcaaatttttgttgccatttatcaagaatcagatttctcattatggatctattaaagtttttggtgacatactgtaacaaaatgattaattatttacatttgtgtgttctttgtataggatgcttatgctccgacatgtttttctgctctgagcctgctacttgcttcataatctgacaagtctggacagttgtcccatgcaatta

SEQ ID NO: 2470 - DNA, 70 bp, Lilium asiatic
  Clone ID: LIB3229-045-P1-K1-H7
gtaagatccaagcttacctacccgagcgggcgacctcatagctgttgtgtagtgtcacctaaatgcaatt

SEQ ID NO: 2471 - DNA, 318 bp, Lilium asiatic
  unsure (1)..(318): unsure at all n locations
  Clone ID: LIB3229-045-P1-K1-H9
gccagggcgctacgccaacccgtacttcagccccaggcgcatcatccagcagcggcgctaaatggtgcaactgaagtatgatcaagattgatcgtgaatgtcctgctgtgttgttttgtatagtcctaagttagagtaggtctttgagttctagttagcttcagctccagagttganttatgttcatcaacactctatcccagtgttgtgttatgttcatcagcactctttccctaatagaagaaacaaaaacaaattaatgtaaagagtctttcaagcatgcttgtttgccaaatcaaaatcagaaggatccatctt

SEQ ID NO: 2472 - DNA, 423 bp, Lilium asiatic
  Clone ID: LIB3229-046-P1-K1-A1
gggaggagaaagaaataatagtaacttggtctagggcatctaccattatacccacaatgattggccatacaattgctattcataatggaaaggggcatttacctatttatataacagatcgtatggtgggtcataaattgggagaattcgtgcctactctaactttcgcaagacatgaaaaaaccgataataaatctcgtcgttaattttttcatttttttttttaattattttttagaaattttaattaaaatcttatctttttattttataagtaaaattaggcagtttttattcatttagtggggataaccttatgataaatagaaagaactcgcgttgtagtacagaaattaaagctttagctcaacataaacatatatgtatgtcggttttcaaagcacgaagagtaattgatcagat

SEQ ID NO: 2473 - DNA, 415 bp, Lilium asiatic
  Clone ID: LIB3229-046-P1-K1-A11
cggacgcgtgggcggacgcgtgggctcgcctcctactcccatcgcatcaccggccggctccatgaccgcaagatcgaggggctcgatgggattcgcgtctgggcattcttccgctggtggtcgattacagggatccggtcttcgggtgatgatcttgtgtttgaggttggggttgcatcggcgaagtacccggcgaagaactttgatgagagtccggattgcgaggggaggggacctaagaaggctgattcgtgaggatctcagtatgtgctggcggtcttatgtcgaccaaggactggggatccccgatggtgaaaaaattacctttcgtcagccagaccgcaacagctcttagtgtttactcatgctgtaaatatttggtttaagtacctgtaataataatacatcaccactg

SEQ ID NO: 2474 - DNA, 113 bp, Lilium asiatic
  Clone ID: LIB3229-046-P1-K1-A2
ggtttatgtttgtctaagcagtcaaatatcgtagtttgctatttgactgtatttgattgggcaagaagaaggcccaatatgtatgtatgctagttgaatctgtttcactgttt

SEQ ID NO: 2475 - DNA, 378 bp, Lilium asiatic
  unsure (1)..(378): unsure at all n locations
  Clone ID: LIB3229-046-P1-K1-A3
ggagcttgccagccggagagcaatggtgtttgtgaaagcccagaaggccagggcttacttcaagcgtttccaagtcaagttcaagagaaggagagagggaaagactgattatcgtgccaggattcggctcattaatcaggacaagaacaagtacaacacaccaaaatatcgctttgttgtcagattcaccaacaaggatatcacagcgcaaatcatatctgcaagcattgcaggtgatatggttctagctgcagcatattctcatgaactccctcgctatggtcttgaagtcggtctcactaactatgctgcagcatattgtaccggccttctcttggctcgtcgtgtgctcaaaaccctngaaatggatgaagacta

SEQ ID NO: 2476 - DNA, 396 bp, Lilium asiatic
  Clone ID: LIB3229-046-P1-K1-A4
cccacgcgtccgtccagcagttaaatgacatataccggtttaagacggaagagtattctcacacagcagttaacaagtttaatgttattcctgattcaattccggagtgggtatttgattttatgcctacccgtggtggttacttcgttggaaatgttagtcctgcaaggatggacttccgctggtttgccttaggtaactgtattgccattttatcatctctcgcaaccccagagcagtctgtagctataatggatcttatagaatcacggtgggaagaactggttggtgagatgcccctaaagatagcttatcctgccattgagaatcatgaatggagaatcatgacaggttgcgacccaaaaaatacccggtggagttaccataatggagggt

SEQ ID NO: 2477 - DNA, 362 bp, Lilium asiatic
  Clone ID: LIB3229-046-P1-K1-A5
cgacctcatccaagccgtacggggaaaggaaaccctcgtcttccattgtgccctcagccaggtgagggggccgtcttgtgcccgcctgttactggatcatttttcacaaactaaagaagatactggaatcaaaagtgttatggtcttggaacgtgggtttaacggatgggaagcttctgggaggcctgtgtgccattgctccgatattccttgtaagggtgagcatgtataattatgtgctaagaactatctgattacctgtccactattgtcagcataatggaaacactagaatctcatactgtgttccctttgacatttcaagactagccaggttgaatgtttatctaattctagcgagc

SEQ ID NO: 2478 - DNA, 361 bp, Lilium asiatic
  Clone ID: LIB3229-046-P1-K1-B1
cggacgcgtgggctgattttgaaacgggtagcaggttgcctttcagcatgacaccgaaaacctcaaggttgcccaagaatggtgagatgcttttgtcgcttcgtggctcacccctcggagtgtacaaagaagagaacttggaagctatagacgaatctggatatgactcgcagaaaggcacctcttgatggaggagtattcacatgatgcatcaccatcaactgtgtatagtaagttggaaatgtttctgaactaattgtagctggatcttttatagatatgctaatgaatcaagctggtttctaactttctctttagaattatgcataaccctctactttcgctatacttccttgctttt

SEQ ID NO: 2479 - DNA, 393 bp, Lilium asiatic
  Clone ID: LIB3229-046-P1-K1-B10
cggacgcgtggggtttgggaatgcccgcaatggagtgttggtgttaagatgagccttctccatttagatactctcttggatgctgctccatttgtggaagaactaaaactacatctttcaacgtgtggggttgaagaatcaccaccgagactcacaaagttaaaaaagagattgcaccttaaacgtgatctttcccatctcaagacagttgaaattagtggcttttattttgagcggtgtcaacttgagattatactgtatcttcttaacagtgctattggactggagtcggtgaccctagagaagggccgagagcctttgaaggaaattgaagagcgggatatgagtagccttaccaacaagttccgccaaatgttaaattagtgatattat

SEQ ID NO: 2480 - DNA, 59 bp, Lilium asiatic
  Clone ID: LIB3229-046-P1-K1-B11
cccacgcgtccgcccacgcgtccgcccacgcgtccgcccacgcgtccgcggacgcgtgg

SEQ ID NO: 2481 - DNA, 383 bp, Lilium asiatic
  Clone ID: LIB3229-046-P1-K1-B12
cgtttccgtcgccctcgccgccgaagttcgccgccccagcgatggcgaagtcgaagaaccacaccgctcacaaccagtcgtacaaggcgcaccggaatgggatcaagaagccccgcaagcaccgccattcctccaccaaggggatggatccgaagttcctgaggaaccagaggtacgcgaggaagcataacaagccgaacggagcgtctgggtctgaggaggagatgcagtcatagattggttaagtgtctcaactgttttatctaggctatggaggataatgagtttctgttgtttggattagagttttgatgactctttggatattaagttctgttttggttcgacctatttcagcttaattaaaagttacttttggattt

SEQ ID NO: 2482 - DNA, 143 bp, Lilium asiatic
  Clone ID: LIB3229-046-P1-K1-B2
ggttcacaaacttggttatggcaactgggatgaactgaaagctgctttccgcacttcacccttgtttcgctttgactggtttgtgaagtcccggacaactcaagaattggcgaggagatgcgatacccttatcaggctggtgg

SEQ ID NO: 2483 - DNA, 298 bp, Lilium asiatic
  Clone ID: LIB3229-046-P1-K1-B3
cccacgcgtccgcggacgcgtgggtggaaatgtattggcgggtttgttaattatccgtggttgtgtttttctggatattaattgttattatctaaaatgttatcattgctaattaaaaaaaaaaaaaaaaaaaaaaaaaaaaaaaaaaaaaaaaaaaaaaaaaaaaaaaaaaaaaaaaaaaaaaaaaaaaaaaaaaaaaaggggcgccccttttaaaggacccaagcttccttccccttccttccaacgataaatcttttttatagggccccctaaattaaatccctggcccgccttt

SEQ ID NO: 2484 - DNA, 415 bp, Lilium asiatic
  Clone ID: LIB3229-046-P1-K1-B5
cccacgcgtccgtgagagctctgctctaatgacgagcagctctcctcctccagcttccttcgacgccaagtcttcccacttccctgagagcaaacgacgacaaggacgacgacaaggacgtccacttctacctcctctcctccccaagaagcttcctttgatggcgacctcccaagaagcttccaccgtcaacctcattacctgaaggcgacctcctctacgacagcaagcttccttcatctccaaggcgacctgagagtgacatgcagagatgttgactgcagagaagtcctccaccgtctgcatgcatcaccagtgaactccagaagactcgagaggatgaaccagagccgtcaatccaatcaaggtaagatttacttcgatttagtactaattcttggctcttattataaaa

SEQ ID NO: 2485 - DNA, 420 bp, Lilium asiatic
  Clone ID: LIB3229-046-P1-K1-B7
cggacgcgtgggcggacgcgtggggtgacccgctccatcaaagccggccttcagttccccgttggcaggattgggcgctacctgaagaagggccgctatgctcagcgtgttggctctggggctcctgtctaccttgctgccgtccttgagtaccttgctgctgaggttcttgaattggctggtaatgcagctcgggacaacaagaagaaccggattgtaccgcggcatgtgtgcctggcggtgagaaatgatgaggagcttggaaggctgttgggtggtgttactattgctcacggtggagtcctccccagcattaaccctgttctgctgccaaagaagactggcaaggaggggactgagcccaagtctccaaagaaagccaccaaatcgcccaagaaggcttaaatacgttatcgagtt

SEQ ID NO: 2486 - DNA, 390 bp, Lilium asiatic
  Clone ID: LIB3229-046-P1-K1-B8
cccacgcgtccggcagctgcattaagtgttcatcaacttgaaggtctagataggtgggagaaacatgctcgttgtgcttatgagttttttgagagggatgggaatcgggcaatccttattgaggagcttgcttcggagctcggacttgggcctaacatcccggtgcatgcagttctccacgattggatcaggcacactgatgggaagctgagcttcctcggttttgtcaagctattgcatggcatctctagccggtcctcagcaaaaccacactgaacaactttagctctctttaaatttggttgttggccgatagtggacatatctaggcgagccttgctcttgctctcatacatgttcaggactcagactgagtttgactggaaaagc

SEQ ID NO: 2487 - DNA, 327 bp, Lilium asiatic
  Clone ID: LIB3229-046-P1-K1-B9
gtacgaagtcaccccgtatatagtagcgaagggtaaagaagacaagaaaaacaagtgatttgcgggatgaaactgagagtacatggagtgctttggtatgccttcctggtgttcttgtttacttattcgagcttattagtctcagacggtatcgtattatatcaataatgggtgtctatgactaggttatagactctggtagtaggggatgtaagatttttgttagcctgtgcatctttgagatttgttgccttatttccgccttgatattggtcctataggccaaagacttctttattatgagaaataagtttcgtgtattgcctt

SEQ ID NO: 2488 - DNA, 323 bp, Lilium asiatic
  Clone ID: LIB3229-046-P1-K1-C10
aagaaggtgcatgctgctatccgcgaggatccaacaatagtcaagtccaccaaggcaccaccaaaggagcacaagaggtacaatttgaagaagctgacctatgaggagaggaaggctagtcttgttaagcgtttgaatgccctcaatgatgccaacaatgatgaagatgatgaggatgatgattgagcttttgttaaaccgactttaaattcgtagtttgtctgaagagttgaacttggtatttttgcgtttttatgttatgttggcagcttgtgttggtaaacttggttctgctctttcttaagtactttgaaattttgact

SEQ ID NO: 2489 - DNA, 412 bp, Lilium asiatic
  Clone ID: LIB3229-046-P1-K1-C11
cggacgcgtgggcggacgcgtgggcacctccattcgaagcaaatcagcgatgtcgggtcgagggaagggcgggaaggggctgggcaagggcggcgccaagcgccaccgtaaggtcctccgggacaacatccagggcatcaccaagccggccatccgccgccttgctcgccgcggtggcgtgaagaggatcagcggcctcatctacgaggagacgcgcggggtgctcaagatctttttggagaatgtcatccgtgatgccgtgacctacaccgagcacgcccggcggaagacggtgacggcgatggatgtggtgtatgcgctgaagaggcaagggaggacgctgtacggcttcggcggctgatgggtctgatcttctgtaagctatagtggtgctggtgtctatttctttttg

SEQ ID NO: 2490 - DNA, 420 bp, Lilium asiatic
  Clone ID: LIB3229-046-P1-K1-C12
ttttattcttccctgataggatgtttagaagtaagctagtcagaatttgtttgcatcagaatattccacaggcttgaaggctatcaaaccattgcgttatttatcaaggaaaacaacaactcaagcttaagccatagagaggtgatggctctatacagccatcctaaaaaacaggcttatttgaccaatgaaactgaaagtgctagttgtctcttcacaaaagagcccatgtcaactataatttagtgtggaacatttcacctagtttagttagtgtggaacatttcacctagtttgctcatgccatccataagtcaccggcccgacgacttatggttggttcagtttgttgctcatcctagtttcatgttttatgttcccaaatattttgcattgagaatagaagattaatctatcgga

SEQ ID NO: 2491 - DNA, 394 bp, Lilium asiatic
  Clone ID: LIB3229-046-P1-K1-C2
gttggagggtaacgacactttttatgtccgatttttctactcctttctacatgcggggggtgcccgtgtgcccttgggccgacaacttctgatcgattcgagcaccgcagaaggtcatggtttttgggtggttgatgatgcgaggggcactggccacacgggctgtcatatctcatcggataccggggtgggttggtccgacacaatgcggactttgtggagggcccgacgagacggccgatcatctgttgtactcctgcccggtctcaaagggcctttggacattcttcagatcggatctaggggtacgggggcgcactttttacattgctcacgcttggacatcttggcgtctctcgggtgtggccggaaggtcgcggcgttcatgagacat

SEQ ID NO: 2492 - DNA, 408 bp, Lilium asiatic
  Clone ID: LIB3229-046-P1-K1-C4
ggccatcacgaggatttaggaagaaggcatgatccattaagaagttctggtggggaatacactggcagttggcaaggtaagtttggttcaggtaaccagtcacacttgaatgattttattagtagggatcctcatgggtttgatgaacgatcaaaagctctttcactcggtaggccatatggccctggctccattagaaaggacattgacggtactgaagtgctacccagtcgcttgggccatgttgagccaaatggttttggtagtattcataatctgcgaatgggcgacccagcgggtcctgggaatttgtcaacgagcagacatggttatcccggtgaaactaaaacattcaactcttttcctatttcctgtggcatggattccattgagtattcaagaatgaga

SEQ ID NO: 2493 - DNA, 393 bp, Lilium asiatic
  Clone ID: LIB3229-046-P1-K1-C7
gggcatcaaaattgatcacaatggctaccgctgctacgatccagttgcgcgtcgtgttcgtatcttgtgtcacgtcgagttttatgagtctctgcctattttcttgctaaggatcttgatcttagcttcctcataactccttgtactcgtccctcagttcttggttctccctctcctccttccactcttatgctttgggtcgtgcctcctttcccttattcgggaatctctccttccgttccagttcctcacatcccaattcttcctgtgacaccaccttccagacaagaaatgcaagcggtgtggtttgtatgagttggacagagtaaaatctgacgatgtctttgatgagtgggagctatgtcctgctgatttttccgatggaaaatatgt

SEQ ID NO: 2494 - DNA, 375 bp, Lilium asiatic
  Clone ID: LIB3229-046-P1-K1-C8
tccacaaggacatgctgaagcagtttaaatatgcacttgtgtggggttcgagtgcgaaacataagcctcaaagagtcggcaaggaacatgagctcgaggatgaagacgttgttcagattattaagaaagtctaacctgtgggttctgcgaaaattctagttactaccagaacaaaattcctgtttggcactcaggtgaggaaatttggaactttgtgctgttagctgtaagttttttgtgaggagatattattttagaagtcgaggatattatatctaagtgtctatgctgtgtcgtaagcgtttaatcttctcaattggactagacgagcttaatatattcaaattggaattgttgttgactggttagtcgtgt

SEQ ID NO: 2495 - DNA, 349 bp, Lilium asiatic
  Clone ID: LIB3229-046-P1-K1-D10
cccacgcgtccgcattaactcaaagtgcttatgattttctcgctaaacccatgctagcaaataagatcttttgttgtcttatctactgcatgggcatgtaaaaaaaaatcatttttttaataaatcaaaaaggcaaaattatgataaattattgttataactaagcaaacttttattttacattcccatgaaacaataattttttttattaaatgtcattttgctaacaaaaataaaccactagtagatcaagtagaaaaagttaacacatgtggttaagtgcaatgtgggtaaccaaaatgtagataaattagcactcttaaatactaagtcaccaacctatattagt

SEQ ID NO: 2496 - DNA, 323 bp, Lilium asiatic
  unsure (1)..(323): unsure at all n locations
  Clone ID: LIB3229-046-P1-K1-D11
gttgtacccgggtggagcgttcgaccccctagggctggctgatgaccccgatgcgtttgcagagttgaaggttaaggagctcaagaacgggaggttggctatgttttctatgtttgggttcttcgtgcaggccattgtgaccgggaaggggccggtggagaatttgtacgaccaccttgcggatccggcgaccaacaatgcgtgggcttatgcaaccaacttcgttcccggcaagtgagggtttcatgttcatgtatccatgtatgtgttgtaactttgatttgggtttgtgatttgaaatgtttatgaaggaacttgctang

SEQ ID NO: 2497 - DNA, 410 bp, Lilium asiatic
  unsure (1)..(410): unsure at all n locations
  Clone ID: LIB3229-046-P1-K1-D12
gggagccaggtcgatgattacgtggcggatgctatcattagtcagctgttacttctcgacgctcaggatcacactaaggacatccggctcttcatcaattcgcccggcgggtcgctcagcgctaccatggctatctatgatgtgattcagctcgttagagcaaacgtctcaactgtcgcactcggcatcgcagcatctacatcttccattatcctcggtggtggcaccaaaggcaagcggctcgcaatgcccaacacacgcatcatgctccatcagcccctcggaggtgcaagtggccaagccatagatgtggagatccaggccagagagataatgcacaataagaacaatgtgaccagaattatctncagttttactggccgaacgttcgaacaggttcagaaagatat

SEQ ID NO: 2498 - DNA, 418 bp, Lilium asiatic
  Clone ID: LIB3229-046-P1-K1-D2
cccacgcgtccggcttcctctctccagcttctacaaacaaccatggcggcggtggcgacgacggaatccgtccaatgcttcggccgcaagaaaaccgccgttgccgtcactcactgcaagcgcggccgtggcctcatcaaagtcaacggcagcccgatcgagctcgtcaagccggagatcctacgctacaaggccttcgagccgatactcctcctcggccgccaccgcttcgccggcgtcgacatgcggatccgcgtccgcggcggcgggaagacctcccagatctacgccatccggcagagcatcgccaaggctctcgttgcatactaccagaagtacgtcgacgagcaggctaagaaggaggtgaaggacatcctcatgaggtatgatcgcacgctgctggtcgccgatccacgcc

SEQ ID NO: 2499 - DNA, 208 bp, Lilium asiatic
  Clone ID: LIB3229-046-P1-K1-D4
atctgaagtgaatgatgaggaaggaagtgaagaggaagaggaggtggaggaggatgaggatgaggatgacgattaaatggatcttgttagatgaagggatctatggtatcttttatttatttctctgagatgtttgtgaggtgccatgttgggctgtttgtgctgtcttgtaccgactttgggcattttaactgcagttgtttgtttt

SEQ ID NO: 2500 - DNA, 186 bp, Lilium asiatic
  Clone ID: LIB3229-046-P1-K1-D5
gcgatctgaagtgaatgatgaggaaggaagttaataggaagaggaggtggtacatgatgggggtgatgattacgagggggtggatcttgcttgatgaacggatctatggcatcttacatcaatttctttgagatgctcgtcatgtgccctgactagcttgttgtccttgtcattttccatcttctt

SEQ ID NO: 2501 - DNA, 417 bp, Lilium asiatic
  Clone ID: LIB3229-046-P1-K1-D9
gaatgaagagaagtaggaaaatgagtgacattcagttcatcttgatcctagcattgctgcttgggctggggtcctgcgaggacttgcagaccaagtgctcgccggagctgacaaagctgatgtcgtgcctgaactacgccaccgcccaggccgatgccccgaccagtgagtgctgcacttccgtggctggcatacgggggagtgaccccgaatgcctatgctacattattcagcaagccagcaagggaggtgctactacgaagagcctcggcctgcagatatcccgcctcctcctgcttccccaggcatgtaagctgactaatgccagtgttaacgactgcccaaagcttttaggcttgcctgcgagctctccagacaatgccatcttctccaatagtaccaaggctgctactacta

SEQ ID NO: 2502 - DNA, 398 bp, Lilium asiatic
  Clone ID: LIB3229-046-P1-K1-E11
gcaagtttgggaggccaatgttcatgctgctggatacgccgcgcagcaagctcagccgcagggcaacggattcttccatccattggagtgtgaacccactctacaaattgggtaccctcctgatcaaataacaattgcttcaggaccaggaccgagcggaagtagttacttgcctggatggcttgcatgataatgatgaaatcaaacttagcacccagtacccagtatgttgggtgcgaggggaattcattcagtttgatgctactttggttcataatggtgagtgcaagccgctctatgtatctaaaactcctgtacaggagtgttgtaatggactactactgtattgtaattctgtggaagacttagtgattttggtattatcagtgctcgccaag

SEQ ID NO: 2503 - DNA, 308 bp, Lilium asiatic
  Clone ID: LIB3229-046-P1-K1-E12
caactattgaaccaataacatttactggaaaaacccagggtaagatagttcctccaaggggccccaatgattttggatgggatccaatattccaaccggaaggatatgaacaaacctatgctgaaatgccgaaagaagagaagaacaagatatctcatcgctctagagctctcgagaaggtgaagtcgcactttgctgctgctgggtacacatttcaaatggaccattaaagtgtttttgtcagcatattattggcgatcgacttggtaactctaaaattaacctttttaatgaatattttgtttttc

SEQ ID NO: 2504 - DNA, 216 bp, Lilium asiatic
  Clone ID: LIB3229-046-P1-K1-E2
gctacgcgtccgaactacgttacaaagatccttgaagggcttatgcgagctaatacagaggttactacagaccggggatacaacttgatggatacaagtgcaagggatactgatggaagtatataccagacgacaaccgatacatacactgctggcatactgaacgctagtaagcgaccatattcgcgccctactgaagcacagtcggttgaggta

SEQ ID NO: 2505 - DNA, 282 bp, Lilium asiatic
  Clone ID: LIB3229-046-P1-K1-E3
cattcccatcaacaacatcatcgtcggatctggataggcggaagacatccatttcaatggagagagacttttctttgtcttctttttcccccttttcgaagtgatatttgttattttagtctagactttttgttgaagctttagaactatgagaaacatgttttagaactatgagaaacatgtatgacagtaattccatcccgaaactgggataattacatccgagatctagaatcttttatctgctctttttgagagtttgttaacaaccctttgaaacta

SEQ ID NO: 2506 - DNA, 420 bp, Lilium asiatic
  Clone ID: LIB3229-046-P1-K1-E4
gaagatacgtagatgtacgttattacttataataggcatatgtcggaacaatctatacttcctgcacggtatgggcactacgtgatcaaaagcgctgtaatgatttcatggaaaactgattcggatgaagatgcgacaactttggtatttgaggctggggcacataagtgagaaatgtgtccacaaactcgctacaagaggtctcaatttctgcgagcattgtgttctaggcaagcatgtaagagcaaggttcggtattgccctacacggcacgaaattgaagggatgctcgactacacccagacgtctaggatccgacgaagactattcactcggaggtaacaaatattttgttagtttcataggtggttactcaaggtgagtttgggtgtctcatgtggcataaagatgatgaacctg

SEQ ID NO: 2507 - DNA, 427 bp, Lilium asiatic
  Clone ID: LIB3229-046-P1-K1-E5
cccacgcgtccgagcgagcttcaaaaggatgaaatatatatccaaccagtatgcggggaaattcaatctcatagttgcattctctcctactggttggacgtttggtaaaggaaagaagaagactcctgggagaagatggcagcaaggcaccatcattcgatatgaagttccatatagcgaacattgcagcttctccgagctgagggagtttgttaagctgatatcccccgaacacatcattccaagtgtgaacaacgattgcccggagtctgcaagttccatgattacacttctcacatcaggtccataaacccacactcaatctcaaaactcatgagagattaatgcatatgacatcctgccattccaaatgaacacagcaacagaactatcacatatgaaggactcaacttttggcgcattcggg

SEQ ID NO: 2508 - DNA, 399 bp, Lilium asiatic
  Clone ID: LIB3229-046-P1-K1-E8
gttgaaaccaaacgaggctaatgatcccctgttcgtcgctaatgtgggggattattctagcatcacgaggatgagcacttcttgaggatctctgaccaacttctccggttcatcgtgagtccgcgatgtatatgctgttcgatagagagcccaaagctcagtgtattttgtgctggcggcatctggattatgtttcgtgacaaaaagtaatgggaatcgggcggaagttatcgttttggttttgtgtaacatactgccgagcctgttagttaccgaaaaaatgtcattattatatgagtctccgaaaatgtctatgctgtttgatagagcctaaagctcaatgtattttgtgctggcggcatctgtgttatgtttcgtgacaaaaagtaatggcaatca

SEQ ID NO: 2509 - DNA, 412 bp, Lilium asiatic
  Clone ID: LIB3229-046-P1-K1-E9
gcaacttaagcgaggggagcagcagcttcaagggtctatcctcggccatgggctccttcgggaggatgggcggtcgtggctctggtcgtatagccaatagctgtgacatggacaaaccctgattcgagcgactttttcgtagatgattcgactgtctgtgcagattttgtgattctgaaggcgaaggagcaagccaataagcagctattggacttggtagttaaatcctgctagcaagattgaagcctagctatcttggcaagacaagaaggttgctggtgtacatgttggaaatgatagtaagctgtgcccccataagcaactacaatacctatttgtgttattcctttgttcgattgaggaaatgtaaagccctaccacaacttttctgtgtgcttgggcacctctagag

SEQ ID NO: 2510 - DNA, 421 bp, Lilium asiatic
  Clone ID: LIB3229-046-P1-K1-F1
gggtgagaagaaactcgaggaggagctattcccgcagcttatcacccagggtaagaagaagctcgaggaggagctattcccgcagtccgcttaggaggagctattcccgcagtccgcctaggaggagctattcccacagcctgtctcctgagccaaggagttggaggagttactctcgcagttattcccccatgccaaggagatcgaaaagaagcccttcagcgaggaaaagtaagggggggtattctcgtgagagttatgctcatagccgcagcatgagcccaaggtctgtttcaacatctccttgaaatcgaatcgaataatgaacttggaatgtttagcttagtttagtggcatttgctttattggctttgtatcccagttaaagcaactggttgtgaagttgggtagctctctcttg

SEQ ID NO: 2511 - DNA, 138 bp, Lilium asiatic
  Clone ID: LIB3229-046-P1-K1-F11
cccacgcgtccgctgcaacttgtggagtttgtttcaagtaaattgaacgccatggtggtgtaatcctggggaaaatgcattacctgtttcatcttagcatcgtaatcctgggtaaaatgcgttactcgtttcttttta

SEQ ID NO: 2512 - DNA, 419 bp, Lilium asiatic
  Clone ID: LIB3229-046-P1-K1-F12
aggaaaatgagtgacattcagttcatcttgatcctagcattgctgcttgggctggggtcctgcgaggacttgcagaccaagtgctcgccggagctgacaaagctgatgtcgtgcctgaactacgccaccgcccaggccgatgccccgaccagtgagtgctgcacttccgtggctggcatacgggggagtgaccccgaatgcctatgctacattattcagcaagccagcaagggaggtgctactacgaagagcctcggcctgcagatatcccgcctcctcctgcttccccaggcatgtaagctgactaatgccagtgttaacgactgcccaaagcttttaggcttgcctgcgagctctccagacaatgccatcttctccaatagtaccaaggctgctactactactgcttccccaaccac

SEQ ID NO: 2513 - DNA, 173 bp, Lilium asiatic
  Clone ID: LIB3229-046-P1-K1-F2
cccaaactcctccattcattgatggtggctgggatatggttgcaccatcgcctcttgctgctgtccctactgaatttgaggctactgcaccagtggacggtactgtctcgagctgggaatagatgtaaattaatatttttaccatttaccaaatgaagtattattgttactct

SEQ ID NO: 2514 - DNA, 402 bp, Lilium asiatic
  Clone ID: LIB3229-046-P1-K1-F3
cggacgcgtgggcggacgcgtgggggaggatcgccgccagctcttccgcgccacccccgtcgatctacagcgaggtagtggtgtgtgcatgatgagtaccacatggagagatgagcaacatccgtctttcatttctttcatctcgtccttcctcaatgcaaatgcttatcgtctcaatttcctccctatagctcctgatttcattttcaacaatggaggagtatcagtagctttcatatttgtcacaaattgggattgcgacaacccctctgctgtctttgtgagggttgacaaactgaagaggcagtttgggcacctctatgttgttgtttctgtcccaaccagagagcagaatgattctttcaaccactcatacttcaagtacacttcggagctaggtag

SEQ ID NO: 2515 - DNA, 377 bp, Lilium asiatic
  Clone ID: LIB3229-046-P1-K1-F5
ccacccgttcgggagaggatactggagacggtggcgttgctgaagcagattatcgggggcggtcacggcagggatgcacacgcggtgatcgattacaccatccgctacctaaagtccctcaagctgcaggccatggccttggaggctacttcaatcatggagaattaacagggtgtttactttcatcagtatctaaacattggtcctcttgataggaatggcatatgttcaataatattcaaaggcaaatggactcgctgccgtgtgagggagccaagtgcaatgaggctgggacatagcgctgcaatgatcgaaggtcggaaggttgaatggctcacatgggttgtgagaggggattgatgggattagcagggtct

SEQ ID NO: 2516 - DNA, 428 bp, Lilium asiatic
  Clone ID: LIB3229-046-P1-K1-F6
ctcgaccctgatactggttatttattacttttggcaacacaatatatgccaaacacaattaatcataacaaataatgtactaaggtatggatattttgttgcaggagaagttattcatccttacggatctttgcagattattgtctatatataagaaatgataaacagagaagtactgcagtgaagggtatacctgaatgagtgattcaacggtctggagcaagaagtcatgatatgcagaaatggtatactctgactttctcgatgagtcggcagcatagtagttcatcatatcgttggatccggcaaagttcaagattaatttaaatattttttaattgtaaattgtaagttaatttttgtttgtaagtttatcacagtacaatatttttgtattgcacaatttgaatttgattatgattattatt

SEQ ID NO: 2517 - DNA, 418 bp, Lilium asiatic
  Clone ID: LIB3229-046-P1-K1-F7
cggtaatcaggatctccccaaatcgagaccaaatcggtaatcaggatctccccaaatcgaggtactatgggatccttgaacaaggcgccgagctgggcggatcagtggggcggcggcggcggcggcgatgatcatgaagaccacaaggacgacgggaaggataaggggaagaagatggataaggcgaaggcggtggcctcggcagggctggacaaggcgaaggctgcggcgacggtgggggcgaagaaggtgaagactgggaccagctacgggatcgggtgggtcaaggcacagtaccagaagaggagttctaaatgatatgtcaatctcaatcctttcttatgagacttgtcttgctttatatgtggtaattagtggaacatgtgataggggtggggtgttacagatttatacttga

SEQ ID NO: 2518 - DNA, 403 bp, Lilium asiatic
  Clone ID: LIB3229-046-P1-K1-F8
gctaaagacacgaatcgatgagcgagggagagaagtgactgaggttgtttgggaaggagaagttgctgacactgttagcactgataataatatgagcattgctgattctgggatcagggctccagcgagtaacaaagcagcagctgcagccactgctccagcgagcaacgcccctaccaaaccaccgccgagcaaaccggtcaacaagcagccagcaaaaggagcagccaagaatactcctaagcaaggaaacatcatgtccttcttcaagaaggtttgaagcgtagccaacttatttttttctcatgatgactagttgtgattgatccaacttagattcaatcctccctagtaattggatagggtggtattgtgactctagcatttagtttttgtgctgtat

SEQ ID NO: 2519 - DNA, 421 bp, Lilium asiatic
  Clone ID: LIB3229-046-P1-K1-G1
cccacgcgtccgaaaattcgttctggtccattgaagggctatcggggccgtgttaaagaggtcacaggaacgttagtgcgtgttgaactggattcacagatgaaagttgttaccgttaaaagagatgaaattgctgatacagctggcacagcaaccccattcagggagtctcgactcgctttgggtagtgaaacacctatgcattcagcgtctaagactccacttcatccattccacactccattgagagatatcggatcaacacctatacgtgatggaatgcgaacgcctagacgagatgcggtttgggctccaatgagccctctaagggattcatgggaagatggaaatcctgcctcttggggaactactccacaatatcagcccggaactcctcgtgcccggccatatgaggcacctt

SEQ ID NO: 2520 - DNA, 425 bp, Lilium asiatic
  Clone ID: LIB3229-046-P1-K1-G11
ccatgttttccccggagagctcagagatgtcaagtggaggagattcgcggctgagtgtggatacggtgccggacgtaggtttgggcaccatcggcggcggcagtaccatgttcctacgggagagcgcagaagggccgtcaagaggagattctcctgatccgaagcggcagggaatggagaagaaagtggagatctacgaggaacaggagcatcaggatttcgtgacggaagatgacaaggagagagaggaggatttcgtgacggaagatgacgaggagagtgaggaagatgacgaggagagtgaggaagatttcgtgacggaagatgacgaggagagtgaggaggaggagatggagattgatgaggccgatgatgggatggacaaggagatcgatcaggtcgttgacgacggtgattcgggatat

SEQ ID NO: 2521 - DNA, 326 bp, Lilium asiatic
  unsure (1)..(326): unsure at all n locations
  Clone ID: LIB3229-046-P1-K1-G12
cttcgaatcagcccccatggcgaatcctgccgcttcccccttgaagaaggtgaaggatttctgggacgctcaggtcaacgacgagcagaagtgggccttcaattcgaagttgattcgtgcggtccttgtttttggtggctcggtggttctcatgcgcaattttggggatctaatggccatctgaagaaaaatgaagtgcccgggacagtgctttagacttttaatatgctgggaactctgtagccccgcagtactttttctccttggtttaatttcattatctggaagtctactctagtatgttgtttccaaccccannanaaaaa

SEQ ID NO: 2522 - DNA, 413 bp, Lilium asiatic
  Clone ID: LIB3229-046-P1-K1-G2
cggacgcgtgggcgatgggacacaattggtggtttccggtggttgtgcagactctggagtgcttttgagcgacactttcgtgttggaccttacaacggagagacctgtgtggagagagataccagtgtcttggtctccgccttcgaggctaggtcacactttgtcggtataccatggtcggaagattctaatgtttggtgggcttgctaagagtgggccacttcggttgcgttctagcgatgtgttcaccatggatttaagtgaagaggaaccctgttggaggtgcattactggaagtggaatgcctggtgctgggaatcctgctggcgtgggtccaccacccagactggatcatgtagcggttactcttccaggcggcagaattctcatattcgggggctcagtggcggggc

SEQ ID NO: 2523 - DNA, 300 bp, Lilium asiatic
  Clone ID: LIB3229-046-P1-K1-G3
cccacgcgtccggaagggaagtcatggaggggaactttcatgctcactctttctgcactccaccaaggtctcctcaccaagagtgtcttcatcaagagtcatagaagttagaagaagagagggaaagctagttcactttcaattcaagcatgtttcatttgtacttttgtttactttttattatgtagtaacttttgcttaagtttttaagttgttgtaatttcaaggtaagttcttctagacttaccttatttattttatgtacttctcaaaatccttttaatataattatgtttcttt

SEQ ID NO: 2524 - DNA, 430 bp, Lilium asiatic
  Clone ID: LIB3229-046-P1-K1-G4
catcaatcatgtcaggccgtggcaagggagggaaggggctcggcaagggcggcgccaagcgccatcgcaaggtgctgcgggacaacatccagggcatcaccaagccggccatccgccgcctggctcgccggggcggagtgaagaggatcagcggcctcatctacgaggagacccgaggcgtgctcaagatatttctggagaacgtcatccgtgatgccgtgacctacactgagcacgcgcgccgcaagacggtgacggcgatggatgtggtgtatgctctcaagcgccagggccgcaccctctatggctttgggggttgatctgtttctgtttattcggatctctgtttgtttgttttggtggtaagttgggttgtggaccattgtatttcatgtatctcatatgaaatgcaattaacttctttttactg

SEQ ID NO: 2525 - DNA, 427 bp, Lilium asiatic
  Clone ID: LIB3229-046-P1-K1-G5
cggacgcgtgggtagcagcaggaagtttacatggaatgcacgtgtaagagtggcacttggcactgctcgcgctctagagtatctacatgaagtgtgcttaccctctgtagtacatagaaacttaaaatcgacaaatattctacttgatgaagagtttaatcctcacgtatcagacagtgggcttgctgcattaaattccaaatctgagaaacatgtttcacccgagaacgtgagttcatttggttatagtgcccctgagtttgacatgtctggaatctatactgtgaagagcgatgtgtacagcttcggagtagtgatgttggagattttgactggtcgaaaaccgctagacagttctagaattagatcagagcaatctcttgtagatgggcaaccccgcaactcatgatattgatgcattggacaa

SEQ ID NO: 2526 - DNA, 343 bp, Lilium asiatic
  Clone ID: LIB3229-046-P1-K1-G8
tggacctcctgaggactattattacagtgctgagccccgtgagcctgtagaatagcgtgatccctatctggaccgagagcctgcgccctaccctgcttcattccgcgaagctggttacccctcaagcgggtcttatgctcctccacctcagtatcgctactaagatcaggatttagcagaatcagataactctgttactttgagctttagttgtgttactttttaatttctgtcttctgcactagctacctagaatcgtatgacttgtctctgtggaactgcatcaacatttgtcaaaccaggtattggtgttgaatgcttttatctgctgtttcttttcaaa

SEQ ID NO: 2527 - DNA, 280 bp, Lilium asiatic
  Clone ID: LIB3229-046-P1-K1-G9
ccacgcgtccggcttatgatagtagcaatcatggcatgctcggcagccagcataatctgggttggggtgatagccagcaaaacttgctcagtaacccgcaaaggctggttgaggaaggggagacaggagttgagcagtaatttttactggtgtgtctcctatatagcatgtttaatttaaaattgtatatctgtgtaggattgattatagaacatatctagagtttctgaaatgaaatgagaagttgtgccatctttgaagagaaaattaatgattctta

SEQ ID NO: 2528 - DNA, 408 bp, Lilium asiatic
  Clone ID: LIB3229-046-P1-K1-H1
cggacgcgtgggtttggatgtggcattactccctctgttccttttttacagaaggtcatggctgagattttcggaacctactttgcaatgttcgccggacatgcatccataatcgtgaacataaaaagcaagggcaccatcaccctccccggcatcgcccttgtctggggcctggtcttcatggtcatgatttactgcgtaggccacatctccggtgcacacctcaatcctgccgtcagcattgcctttgccagttgcaagaggttcccatggaaacaggtaccagtatacgctgcagcacaaatcctgggatccatcctcgccctcgggacgctgcatttgttatatggaggagggcacgagctctttgctggttcagttccatctgggtcgaacattcaatctttg

SEQ ID NO: 2529 - DNA, 415 bp, Lilium asiatic
  Clone ID: LIB3229-046-P1-K1-H2
gatcctctaatgagtgatgtcttttacgagtgcaagaaggagcttttagcgaagtctgcaactggagaaccaatttcagatctatcagatgttaaatttcctcctcttcaagctgaggggtctcgaattgaagagaaaaatatgttggtttcaggactgatacaaaggagtatcagtactgggtgtttaaagtcggtggactgggcaaatggttgcacaatgaggccaaactttcttgattttcaagggctggacgttcaagctgtgctcgggatgaggagggcattcagtgaaggagacattcagattctcagaaataataatctgaaccttggaagcaaaagcattgtctgctctccatttgagcctctatcgaccgtcaatgacatcaaagcttgagaacgaagggaaaagc

SEQ ID NO: 2530 - DNA, 361 bp, Lilium asiatic
  Clone ID: LIB3229-046-P1-K1-H3
aagaaattggagcctcttcgaagtcgagttcggtgtttattccgcacggtccaggggctgtgagggacatcacatcgcagattagggacggactcctccagggcaatgctagtatttcccagtgaaaaataatgtagaaaataccagtggttactgcgctgaatgttttgtgttcttgcttttgtggtaatatgtttgcgaatttacagacgtgaatatgtacagctgtgtgtttttttacttgtaagtttggatcagtttaatgacctatatatcatattaatgtgctcctatgtaaagataaaagaatttgattgatatgagggatagtctgactctcggggcgggtcgaatgacaaaa

SEQ ID NO: 2531 - DNA, 317 bp, Lilium asiatic
  Clone ID: LIB3229-046-P1-K1-H8
tcatgaacagcttcatcaatgatctctttgagaagatggctcaggagtccgcccgccttgctcgctacaacaagaagaacaccatcacctctcgggagattcagacttccgtccgcctcgtcctccccggcgagctcgccaagcacgccgtttctgagggcaccaaggcggtcaccaagttcaccagcgcttagggtctctactgtctacctctttgtgttcagacttgttattgtattggtcggatgttttcgtgaatgtggaaccaaagcctctttggtttgctctgctgttcaatctcaaatgctctttctttt

SEQ ID NO: 2532 - DNA, 205 bp, Lilium asiatic
  Clone ID: LIB3229-047-P1-K1-A1
gacccagctgattgtttcatggcttctgtgccgctgtttgttggaataaaaagacatgtatgttctcaactatgctgtgcttgaagctcttatagcgttctacttaccgtttctgagtttgtggagtacttgtaatggccatgtatctggatgtggaactccttgtctcttataaagcccttgcaatttgcttcgagtttcttta

SEQ ID NO: 2533 - DNA, 293 bp, Lilium asiatic
  Clone ID: LIB3229-047-P1-K1-A10
cgggagcttcgtgagcgtagcacacaaccatataaaagaaaaggctacactcaggacctctctgaggctgggaatcaatcgtttgttggaggatctcaaggccgagggggatgagagcattattgttactctggtcccccggatgggtacggtgaaggtgggaagcgtttcaatagaattagattcttgagagacatggtagttcttgcttaagttgtgttggcgttggaataaacttattgttggtcgtgttttgatttcagtcaatgcagttctaagatttgtccggtttc

SEQ ID NO: 2534 - DNA, 293 bp, Lilium asiatic
  Clone ID: LIB3229-047-P1-K1-A11
cgggagcttcgtgagcgtagcacacaaccatataaaagaaaaggctacactcaggacctctctgaggctgggaatcaatcgtttgttggaggatctcaaggccgagggggatgagagcattattgctactctggtcccccggatgggtacggtgaaggtgggaagcgcttcaatagaattagattcttgagagacatggtagttcttgcttaagttgtgttgacggtggaataaacttattgtttggcgtgttttgatctcagtcaatgcagttctaagatttgtccggtttc

SEQ ID NO: 2535 - DNA, 312 bp, Lilium asiatic
  Clone ID: LIB3229-047-P1-K1-A2
caggagcttcgtgtgcgtatcacacaaccatataaaagtaaaggctacactcaggacctctctgaggctgagaatcaatcgtttgttggaggatctcaaggccgacggggatgagagcattattgttactatgcacccccacataggtacggataaagtaggaagcgtttcaatcgaattagattcttgcgagacatggtacttcttgcttaaaacgggttgtcgccggaataaactcattgccggtcgcgttctgattgcaatcaacacagggctaagatttgtccggtttcaaatagaaaaaagggtttt

SEQ ID NO: 2536 - DNA, 406 bp, Lilium asiatic
  Clone ID: LIB3229-047-P1-K1-A4
aaagaagaccttatccagcttccgtccgacaaggctcttctagaggatccagttgtccgccctctagcggaaaaatatgctgctgatgaggatgctttcttcgcagattatgctgaagctcatctaaagctttctgagctgggatttgcagatgcggatgcgtgaaggttttgatagtctcggttactatatgaaggaagaatgataataataaagctccactgattattagtcgctctgttatcaattctgtgtgggctccattgctagtctcggttactctagtatttgagctatttctcattttgcctagttcatctgactaatgctcttgcgtgggactcagcgtgcacgataatggagccttactatttctaggtctcgatgtcacattgtgactaccatg

SEQ ID NO: 2537 - DNA, 197 bp, Lilium asiatic
  Clone ID: LIB3229-047-P1-K1-A5
gaagaagtcctcgtgcattctacgtccttctcggcctttttttgaggaaccagatttaccgctctgaagcggtaaaaccggcgatcaatcggttgtcggaagatctttagccgcgggaatgaaaattttgttactttgtccccgttggtcgcaaggggagcttaatagaacaatctggagaatggagtatgttaatg

SEQ ID NO: 2538 - DNA, 387 bp, Lilium asiatic
  Clone ID: LIB3229-047-P1-K1-A6
ctcaattctctcagatctctcactaatggcgcccaaggccgagaagaagcccgcggcggagaagaagccggcagtcgaggaggagaagaaggcggttccggcggagaagaagcctgctgagaagaagccgaaggccgggaagaaggtcccggcctccaaggagggggcctctgacaagaagaagaagaggtcgaagaagtcggtggagacctacaagatctacatcttcaaggtgttgaagcaggtccaccctgacatcgggatctccagcaaggcaatggggatcatgaacagcttcatcaatgatctctttgagaagatggctcaagagtccgcccgccttgctcgctacaacaagaagaacaccatcacctctcgggagattca

SEQ ID NO: 2539 - DNA, 385 bp, Lilium asiatic
  Clone ID: LIB3229-047-P1-K1-A7
cgctgtaccggtgccggtaccgccgcgtcgtcccacgcgtgcgcacgcgctcggagtgcgttgaacaccaccctatactagtaccggaactattgggcgagatctcctcagcacaaccaccttttcaaatcaatgaaaaactgaccatgccggagaagctcttcgctgtgtacacagacattctaacaaagatggggatgaaccacgaagatgctgaaacgtgtcaggtttcgccgtagacgggaacgtgctgggaatcacggatgggtgccggaatttgagccagaccgattactatccttttgctatttacaatgtggctgttttttttttcttaatacttgtgaacatgggttttaaggcacatacgggtggtgatttgtct

SEQ ID NO: 2540 - DNA, 431 bp, Lilium asiatic
  Clone ID: LIB3229-047-P1-K1-A8
cgcctccgcaacaagatcgccggcttcttcacccaccttatgcgccggatccagcgcgggccagtccgtggcatctcgctcaagctccaggaggaggagcgcgagcgccgcatggacttcgtccccgacgagtccgccatcaaggttgacgagattattgtggacaaggagactctggagatgctcgagtcgctggggatgtctgatctgcctggtgtgcagaggcaggttgaagcgccggcgcagccggcgtatgctggacgcggtggcggtgggtttggtagaagtggctttggcggtcgcggtggcggagccaggaactgaaggcgtagcttcgaactctctgggcttaggtgaaatggttaccatgttgctttactttgtgttgacttgatctccatctgaacttggtattggagtattcgagtatt

SEQ ID NO: 2541 - DNA, 393 bp, Lilium asiatic
  Clone ID: LIB3229-047-P1-K1-B1
cccacgcgtccgattttttcagagtataagccttcttggctattgcctatttcctctggatgttggagctctagtgtgcatgctgaaagacaatatcataataaaggttgtggtggtggcgatcacattggcgtggagctcctgggcagcatatccattcatgagcgctgccgtgaatccaagaaggaaggcattggcactatatccagtttttctcatgtttctatctgttggttttttgatcattgccatagactaaggcagatcattttggtggagtgacaaggatgaagacttgttttcatcatatacagatataaatagtcattttgttgttctcgcagttgtaggagtgtctgtcgggattgtgttctatgagttttggatatggtt

SEQ ID NO: 2542 - DNA, 400 bp, Lilium asiatic
  unsure (1)..(400): unsure at all n locations
  Clone ID: LIB3229-047-P1-K1-B12
gggagcaacgatggctgtcccagtcggtccccgcactctcctcctcaccctcgtcgtgacggcgctcctctcctccgcgtattcgttggatttcgagtactgcaataagagggcgcactacccggtcaaggtgaaggggatcgagatctcgccgctgccgatcaaacgaggcgtgcctgtgagcttcagtatttccgcatctgctggggagtccatatccaaggggaaactagttattgatgttgcgtactggataattcatgttcacgaggaaacagatgacgtttgcacaaagacatcttgcccgattgcaacaggtgatttcgtgatatcccatcagcagacactaccatccctcactccaccgtgttcgtacacgctnacaatgaaagtcgtgggt

SEQ ID NO: 2543 - DNA, 323 bp, Lilium asiatic
  Clone ID: LIB3229-047-P1-K1-B2
cgagaagtgctggtgttggcgagaaccgcaaaaagatatgcacctgcgatggtgtgaccatatgggaatcaatctgaactttgttctctactatctaagatagctttgcttaaagcctgagggtaggtatatgtggttctctctctgttcacaataatatatgttatgagtcacaagaatatccttcttcgttgttggtattaacattctccccacactttctttccctcactttgtagacatttccggtattcaaaaagttatcttctatggtgtcaaaatagttttctatggtgtcaaaataatcccaagggaaacaaaca

SEQ ID NO: 2544 - DNA, 365 bp, Lilium asiatic
  Clone ID: LIB3229-047-P1-K1-B3
gagaaatcggagggggaggagatggagaaatcggagggggaagcgatggaggtggatgcggatgcgggatcaagatctacgacggagttgacgactggtgaagagcaccccaagagatcgacggaggaggtgacgactggagctccctgcaaaaagaagaggaagatagctgagcaagcacaagagactgaaatcgagaacaaaatggaagagcaaacccagcgcgaaatagacgaggaatgcgattacaacatacttatcgactcgccaccaattgtagatgctaatatcgaaaatcgcgctggatgcctgaagataggctactctggtgttcttgatcttgaatcaatggatcctgagaagga

SEQ ID NO: 2545 - DNA, 374 bp, Lilium asiatic
  Clone ID: LIB3229-047-P1-K1-B5
gtctgtatcgtgtgagatcgccgccgccgtccgccatgattgacaagaaagagcctgtcgaaccctgcaatttgaacgccgctccgtttctagaggtggacataacatgccccgacaacgccctcaaggactcggatgctcatgatgatgccggattacatgacaagcttcagagcccgatgaagcaggattcggatgctcaggttcatgacaagcttcagagcccggtggagcaggagtcggatgctcgcgatgatgtcggattacatgacgaactttagagcccggcggagcaggtaccaaaatggatggaaggactcacgacagatgtcatgaggcgggtccagcgcctacaaaagtttcaggatcgacag

SEQ ID NO: 2546 - DNA, 431 bp, Lilium asiatic
  Clone ID: LIB3229-047-P1-K1-B7
cggacgcgtgggttggatggtaacttcaaggttgatacctctgccgctattcctgcaacaccggctgccccacgatcaaccagagctgctcctgtgcgcagaagagtgaggcgtaaatcttctgatgatgaggacgatgatgataatgaggctcttcctgctcttgaggttccaatcactcctagcctggtcagcgggcgttcacagagggcaagcaaggcgatagcaatgaccaaaatgagcattaaaaccaccattcagttctcggataatgaagatgaagaggagtcggaggtgacctcagatgattctagtgatgaatcttgtgatgggctttctgagtgaaacatgattctatgtcttattgaatcttgtatccagcttttctcgaccttacttaaaatggcgatgctgtttgttacctaaatatc

SEQ ID NO: 2547 - DNA, 368 bp, Lilium asiatic
  Clone ID: LIB3229-047-P1-K1-C11
ctctttgatccggattcccctctctgttcgatatggcatcagtagaggtcgaatgtgctccagtccccgtggaaactgtaccggcgcccgcaccggctacagataaagttgcagcggaggcaccagtagaagaggtggcagcgcctgctgcagaggagccgacagtagaagttaagaaggccgaagaggctgctgatgtggtagagccggaagctacacctgaaccagcagtggagacagctgtggaagagacaccgaaagaagtagcacccgaagctccggcggcagaaccagaggctgctgcggcagctgttgaagatccagctgctgtgacggcagcagtcgaagagacggctgctacggaagct

SEQ ID NO: 2548 - DNA, 320 bp, Lilium asiatic
  Clone ID: LIB3229-047-P1-K1-C12
cccacgcgtccgaggatgggacgattaattacgaggatttcatcctccgcatgatcgccaagtagatcggagaactagtgcttggggagaatgagattcgaagccgctgtttgaactacctgtttctggtttcttggtctgtagtgtatttgtctgtctcaccggagtttgtatgagttggtttgtttctctgcaattgcttaatttatttttgttataagtggatctatgtgtgttggtttgttttatgttgttttttatttgggcttgtgactgttggaggactggttgccttgatatatggaacatctcattctagc

SEQ ID NO: 2549 - DNA, 376 bp, Lilium asiatic
  Clone ID: LIB3229-047-P1-K1-C2
attctcgtctggactcgccgccggatcggcagtctcccccaccctcgccggagctcacaagagtctgaactcaaaatttacacatgggaggtgtgcaagattgtaactcagttatgcaaaactcgcaagatgtgatctccgatatggaaggaaagtccgacagcacgaaatgtgacagcttgtcacatgtagagaaattaaggaagttacttcaccatcgaatgctgatagggatcaaagacggtcgcttctttctgggtgtgttccactgtattgacaagcagggcaatatcatccttcaggatgcagtggagtaccgcagcactcgacgttcctcaccgtctccaatggaacagcgatgcctcgggcttatcct

SEQ ID NO: 2550 - DNA, 435 bp, Lilium asiatic
  Clone ID: LIB3229-047-P1-K1-C3
cggacgcgtggggcgagtttagttcatcggctcggcgagcgtcaatggctgagattgagttgaaaacagccccagctgattttcgcttccccacaacaaatcaaacaagacactgcttcactcgctatgtggagtatcacaagtgtgtctctgtaaaaggtgaagagtctggtgattgtggaaagtttgcccaatactacagatcactctgtcccggggaatgggttgagaaatggaatgagcagagggagaatggaaactttcctggccctctctaattgatggatccattagaactctattgtttgctgttgtcgggcacataaatgccgtattgaattagtttttcattggctttatatggaactgcggtttctgtagctgtaataatttgcggttatggcggtttctgttactgtaataatgagtatatct

SEQ ID NO: 2551 - DNA, 426 bp, Lilium asiatic
  Clone ID: LIB3229-047-P1-K1-C5
cttgaaagcttttgagagctggatacaattcgactcaaatccaatttatgctctgctgcatgaatccatatactgccagggcgcatcatcgaggtggtcagcccacaaaataaggggggagtacgagagattgttcgatccaatcaaagctgcaaaagaaagccgtcctgtatattttactggagagatgatattcccatggatgtttgacgagattcatgctctgagacctttcaaggaagctgctcatttgttggccgagaaacatgactggcccccactgtatgatgttactacactaaatcataatcagattccagttgccgcggcagtttactacgaagacatgtatgttaacttcaatctctcaatggaaactgcttctgaaattggtgggattagattctgggtcacaaatgagttcat

SEQ ID NO: 2552 - DNA, 411 bp, Lilium asiatic
  unsure (1)..(411): unsure at all n locations
  Clone ID: LIB3229-047-P1-K1-C6
gcggagagcaacgaggagaaggatagcatgctcgacggcgcttgaatcgatagactccggcgagctcagcgatgtctggatgcctccacctcgtctccaacggcgccccaggttttgtagtcccagataggaaatgccttcagggctctggtacatcgaaaagtttcctcaactttgcctcgagtcatcggtcctttgtatgcaatatgaattctaataaccgtagaaggaaccctgatttttcaagacaacagaaagggtcttcacgaggcaagagcaggcaattccaggagcgagagactntcgagagccctgaacaggaccctgcctcgaaaaatgggtcgctgttttctctctccggcaaccaaaggggccaagcgactgcgatacctggcaaagagagaagagatc

SEQ ID NO: 2553 - DNA, 63 bp, Lilium asiatic
  Clone ID: LIB3229-047-P1-K1-D1
cccacgcgtccgcccacgcgtccgtccacgcgtcctgccacgcgtccgaccacgcgtgcggac

SEQ ID NO: 2554 - DNA, 356 bp, Lilium asiatic
  Clone ID: LIB3229-047-P1-K1-D10
gactggtgtatcacagatcgagcatgaccaacgtgttctctgtgacggcaaacggtgtgtgcactcaagccggcgaaagatactatagaccgcgttctgaccatagctaggcctaagcaaggctagaaagtggctgatgggagcctcaatgaggaggaagtccggtaccgagaaagaagaacaggcagggctattacgtcctgggttacatgaaggagctgaactgtaagcatgtgtgccgctggtcaccgctccctagctgcagcatgcaagccgtggctggaactgatatgatgaaccaaaacatgtgtgtgattctgaatgtttttggtttgctccatcatgcggcgggctgt

SEQ ID NO: 2555 - DNA, 413 bp, Lilium asiatic
  Clone ID: LIB3229-047-P1-K1-D11
aaaacatccaggaaattaaaatcagtccgggaatcatgctgttaatattcaaccgaactcagagttctgttccgctgaagatactctctattgaagatgggatagagttgaaatcgttcaatcacatgttacaccgcaacaagaaggtggatttcatcgagcagttcaacgagaagcttctggtcaagcaggaaaatgagaaccttcagattctcgatgtgcggaactctgagttgactgaagtttgcaaaactgagtttatgactccctcagcgttcattttcttgtacgagaaccatctcttcttaacattccgaaaccgcaccgtggcggtctggaattttcgcggagagctagtcacctccttcgaagaccacttgctctggcaccctgattgtattacaaacaacatt

SEQ ID NO: 2556 - DNA, 396 bp, Lilium asiatic
  Clone ID: LIB3229-047-P1-K1-D12
aaaacatccaggaaatataaatcagtccgggaatcatgctgtttatggtcaaccgtactcagagttctgttccgctgaagatactctctattgaagatgggatagagttgaaatcggtcaatcacatgttacaccgcaacatgaaggtggatttcatcgagcagttcaacgagaagcttctggtcaagcaggaaaatgagaaccttcagattctggatgtgcggaactctgagttgtctgaagtttgcaaaactgagtttatgactccctcagcgttcattttcttgtacgagaaccatctgttcttaacattccgaaaccgcaccgtggccgtctggaattttcgcggagagctagtcacctccttttaagaccatttgctttggcaccctgttt

SEQ ID NO: 2557 - DNA, 431 bp, Lilium asiatic
  Clone ID: LIB3229-047-P1-K1-D2
ggaaaatccgggcatgtccctcggtgaatcctggctgtgtgtcgacgaatcctcagtcgccgtccttcagctttccgtgggtgataccggagaaggaatctggaaatgccgttcagaggcttcgtgatgctatagtaaaaacccagaagaatgcaagaattaaagtcgatgaagacaccccaaatggccattatttgcaagcggaggttgacgggggatttggacgcgatgtaatagagttcttggttaaaaatgatgttgttgcctaccgatccatggccacgaaagtgacttacgtctacccatttacgacagcatttggcgactctaaagggcagaaagaaagggtgaacaaaatcgtcgaagagttgggttggtatgctccaagttttgagtcgatggattaatctgcctcgttcttgtactagcac

SEQ ID NO: 2558 - DNA, 419 bp, Lilium asiatic
  Clone ID: LIB3229-047-P1-K1-D4
gtctgatagatgtccaagtgaaggagatgaaatccatgagtgaagttattcgcaagttggaagcaagggaacatagctacgctgagaacagactgatgaaggatcatgttcaatcgactactggtaatggttccaccaacaatttctggaatcctgctcacctcaaccacttagatgtaggtccccctcctgctttttcaaagcaagtaaaagtgaatggcacatctaatacagactctggggcagtgaggccttcatcatcacctgcatcaatggagtctttaacagcaccccacccaaagtcatacatggaggtcatgtctatgatccaaagaggggaaaagcctcctggcatcaaggatatcaatgatatgcctccaaatccaaatcagcctccgtcaagatcacttttagtacct

SEQ ID NO: 2559 - DNA, 215 bp, Lilium asiatic
  Clone ID: LIB3229-047-P1-K1-D5
gcttcataggtgtggcagtcaatcaaaaggctacgttcccctgaattactcctatgtacaccggggcatatccattctactctcattacagactgaacaaggatactggtcaaaacacgactacttatgagtagtccgacaatgccttacagtcattcttctgtaaaccacttccatccttgaacgcttcgagagtcttatatacaagtatacct

SEQ ID NO: 2560 - DNA, 254 bp, Lilium asiatic
  Clone ID: LIB3229-047-P1-K1-D6
gttctcgattacgaagagctagaaaaaggtgtatattcattcctattgatcatttagtggaagaatgacactaaagctacctgaagttgctaaaaccagaagattttcgggataccaccactgtggataatatttaacgtgtacatacttgttatccagagttaaaaaatgtagatcctttgaatatcccattgccaatgagtacccagcagacaattaagaagattaagccagtgagaatgcagtaccaaaat

SEQ ID NO: 2561 - DNA, 314 bp, Lilium asiatic
  Clone ID: LIB3229-047-P1-K1-D7
cggacgcgcggggttgagtctgccggttgtgattacgatcacaatcgcactagttggtttaatatggattgtttactacagttactgacattatgaccaccctacactcagccagactttactcgccctatgtcctagatagcctccaggatcacatacttctccaaaacacccccctgaccgtttcatactgccgcagtgacacataatgacttagcgcgcgcgtccattgacatcgatcaaacacaacttttgcagcttcccattcatgggcgcttaacacgctcacatataacgtttcacaacagtattta

SEQ ID NO: 2562 - DNA, 425 bp, Lilium asiatic
  Clone ID: LIB3229-047-P1-K1-D8
gtttgagactgcactgctcacctctggtttcagcctcgatgagcccaacaccttcggcaacaggattcaccgcatgttgaagcttggcctcaacattgacgatgatgaggtatcagccgatgctgcggacactgagatgcctcctcttgaggaggatgctgagggaagcaagatggaggaggtcgattaactgatgagaaccattgaggggagatggtagtttctatgcctttgcatttcagtatctagtatttttctaactatagtcgtggactttggtgctgttattggtcagattttgaaccttatgggtagtttttgaacactagatttctctaggccacaaacatatattgattgatggccttgtagcttgataaatgctgtgttggttcaatttatgttatttcttcaactttcttaag

SEQ ID NO: 2563 - DNA, 417 bp, Lilium asiatic
  Clone ID: LIB3229-047-P1-K1-D9
gtttgagactgcactgatcacctctggtttcagcctcgatgagccgagcaccttgggcaacaggattcaccgcatgttgaatcttggcctcaacattgacgatgatgaggtatcagccgatgctgcggacactgagatgcctcctcttgaggaggatgctgagggaagcaagatggaggaggtcgattaactgatgagaaccattgtggggagatggtaggttctatgcctttgcatttcagtatctagtatttttctaactatagtcgtggactttggtgctgttattggtcagattttgaaccttatgggtaggttttgaacactagatttctctaggccacaaacatatattgattgatggccttgtagcttgataaatgctgggctggatcaatttatggtattggttcaact

SEQ ID NO: 2564 - DNA, 429 bp, Lilium asiatic
  Clone ID: LIB3229-047-P1-K1-E1
cccacgcgttcgctgcttggagtaacaaggggcccgaatcacttaatcctagacactcgtagatgacatggtataccattacgaatgatctggatactaatctccctggctttgacattcttcggaatgtaatgactggaccatcttcctatattgcctgaagactgagatgctaagattgtgaagcataagcatcacctaccataggtataaatgactacaaaacaccctagacccaaaagaaaattctgtatcccaactacagaactaaatggaaggcacctataagtgacaacccggattgcaaggatgatccgtacatttatgcttttgacaatcacgaaatatggtatcatttaactatggcaggtgaaatacgcaacattggttgacaatgctctagttactgatgaccctgaatatgcaaag

SEQ ID NO: 2565 - DNA, 365 bp, Lilium asiatic
  Clone ID: LIB3229-047-P1-K1-E10
cccatctgtctgaccttacttaccatccccttcctcctcccatgggggtgttgtggactagcccaccccctcaatagcaatccactcccccacaacagacccaaccgaagatccaagatctccctatcttgccggagccagttcgcatctgggccctccgataaagagggaaaagagaagcacagagtgaggaagcaggggaggtggtataaattggcagagctccgcagcaaggccgagaatcttagaagcactgtgaaggagagcatgagcccgaagaggaaaggagactggaaggacttggtgctgatgaacctctcctttgcggtatacgtctacatatctcagatgataggatgtactta

SEQ ID NO: 2566 - DNA, 412 bp, Lilium asiatic
  Clone ID: LIB3229-047-P1-K1-E11
cccacgcgtccggctcgaagtcgccgatggtcttcggtcgagtttgcggagatagctcaagtttctagacaacaatgtcgatgggtatgatgaagccgctgaaggctggttttgaggagcagcccgatgctcaccgcattcggattactctttcttctaagaatgtgaagaacttagagaaagtctgtgctgatctcgttcgtggtggaaaagacaaggggttgagagtgaagggacctgttaggatgcctactaaagtcttgcatatcaccacaagaaagtctccatgtggagaaggtacaaatacctgggaccgctttgaactgcgagtgcacaagagggtgatcgacctggtcagctccccagagggtgtgaagcagatcacctcaataacaattgaacctggggtcga

SEQ ID NO: 2567 - DNA, 410 bp, Lilium asiatic
  Clone ID: LIB3229-047-P1-K1-E12
tgatttggagcaagatgaaataccagtaaaaactcattctaaatctttgaagctaccgaaggagtttgatgcaaggactaactggcctcaatgtatcaatattggaaacatacttgaccagggtcattgtggttcttgttgggcctttggtgcagtagaagcactacaagatcggttctgcattcattttggcatgaacatttccctatcggttaatgatcttttatcatgctgtggctttctgtgtgggagtgggtgtgatggaggttatcctatacgtgcgtggaggtatcttgcccgtagtggtgtggttaccgaggagtgtgatccttacttcgacaacactggttgctctcatccaggctgtgaacctggttttcaacaccgagatgtgtgagacactgtaaaga

SEQ ID NO: 2568 - DNA, 304 bp, Lilium asiatic
  Clone ID: LIB3229-047-P1-K1-E3
cccacgcgtccggtcggagtggtggtcgtggcaggtttggaggaagagatggtggtggcaggggccggggtggtggtggtagatttgggggttcagggaggaagactacctttggtgatgactagggattgaggccttgactacattttgggagatgattgtctgttaaactcttttaaggataatattttatctgtcttattcagttaagttgtcttggtatttggtatttaactgctgtattgtagtgacttggattatatcttgcagtttaagctgatgctaaatattgatcttggcaaat

SEQ ID NO: 2569 - DNA, 159 bp, Lilium asiatic
  Clone ID: LIB3229-047-P1-K1-E5
ccagtatgatttagtgtttgagatggaatccgaactatctcacagatcaaagagcactctgcgtaaacatctcttttattggctacaggactctcgcctctgaagctggcccacatatcgcttgttccggagaattggtataagtcctggggctatttt

SEQ ID NO: 2570 - DNA, 427 bp, Lilium asiatic
  unsure (1)..(427): unsure at all n locations
  Clone ID: LIB3229-047-P1-K1-E6
ctttgttatatgcaaagtattagatttatctattctattgtgacaagatgggaatgagagatgggatacgaacaacgtatctgatgagtccatcctgaataaccaaccgccacgtaggcccaccccgtcaaaacctttttactagtcggccggggagaaacaaccaactcgtcgtgggaagggccaacccactggcggactggatcgaaagatcttcgccggtccacgggatgcagtttccaatcttcgccaagtacagcggaaagacatgggggagggaccacctactctccttcgaagctcaagtcagcctcaacgagggcctcatgtgcaaggctttccttagcactctccaaggaactgccctctcctggtttggtcggctttccccgagcagagtttncgggtgggaagatttcaagaggaa

SEQ ID NO: 2571 - DNA, 416 bp, Lilium asiatic
  Clone ID: LIB3229-047-P1-K1-E7
cctgtattctgttgaggctgcagccggacttgttgtcatattaggatcggatttgagtagtaattatcaaactatccttgcggtctctatgatctgggcttggtggtagagatcaggagaagatgtactcatgaccccgatatatgaatggatcaaacaccatgatctttgatcccctctatgcttgattgcgtgtcttcgctaatagtttcttttgagcttcgagtgtcatgacccgacgaggattacatcccctatgacaaaaaaattatggtaaatacttgatcagtttttcccgagatatccttattgaagtcatggttttgtgttagttggccttgctagttcggagtgtttacctgaatggtactggccatgaattggttaagttggtcgtactccattagtcgttttat

SEQ ID NO: 2572 - DNA, 428 bp, Lilium asiatic
  Clone ID: LIB3229-047-P1-K1-E9
cccatctctctgaccttacttaccatccccttcctcctcccatggctatcttctgactagcccaccccctcaatagcaatccactcccccacaacagacccaaccgaagatccaagatctccctctcttgccggagccagttcccatctgggccctccgataaagagggaaaagagaagcacagagtgaggaagcaggggaggtggtataaattggcagagctccgcagcaaggccgagaatcttagaagcactgtgaaggagagcatgagcccgaagaggaaaggagactggaaggacttggtgctgatgagcctctcctttgcggtatacgtctacatatctcagatgatagtatgtacttactgtgcttgggtctctctcctcaagcactcgtagtaaccctaatttcttctgcttcatttatgg

SEQ ID NO: 2573 - DNA, 255 bp, Lilium asiatic
  Clone ID: LIB3229-047-P1-K1-F11
atggccacaaaacaatgcatctccgatagtcagccagaatgaatatcggggtggggggggcgatctcaaagacccaagctttccacccccatgcttgcgacgatgtacttcttttatagtcgctacacttctagaagagaacttccgtcattttacaacctgttgtctggggaaacccaccactttcccagctgttcagcctttcagtgcatacccctttatcgagcggcgggagaatccagaaggctctagccg

SEQ ID NO: 2574 - DNA, 329 bp, Lilium asiatic
  Clone ID: LIB3229-047-P1-K1-F12
gcctcgagccacgggcaatcttattaaatgatccacacatccttaatcgatggaggggcggtagataagtcgcatctagacacctactaatacatgacaacggcgcccgatattgagtatcacctaattgtgaatgtcttcaaggatatggtccatggtaaagagtgataaacaatgcttcaactcatctgaagatggtctttaatgtatactgttaccaccgctcaaagaactcaaattatgttggccttctgatagggtctcaaatgggcaagagacagcattccccggatctatatcctttttagaggagtgaacaagtccctgct

SEQ ID NO: 2575 - DNA, 315 bp, Lilium asiatic
  Clone ID: LIB3229-047-P1-K1-F2
gtttcctaggtttggctataaataaagagggaagggaaccatggaaaacccctctccacaccaagttctcttcattcaagtctacttcaaaagagaagaaggaaaaaagggatcaaaggaggaatttgagaggagtaggagaagacttcaagtcattctcctatgatcccaaaccaaccttgaacccttggagagtcttctattcagtgattcctgcagtttctcttactttaaatgtcgtaatttcttcttatgttcttatctatttacttttgtacctagaatttctctttaatgcaactttatttctagtcc

SEQ ID NO: 2576 - DNA, 98 bp, Lilium asiatic
  Clone ID: LIB3229-047-P1-K1-F5
gcggctctagatcgcaagcaatctctctagaggatccatgcctacttactcatacatgagactggagaggcgttttattgagggacccaaactcaatc

SEQ ID NO: 2577 - DNA, 417 bp, Lilium asiatic
  Clone ID: LIB3229-047-P1-K1-F7
cccacgcgtccgcggacgcgtgggctccctcagaaccctagtttgttttcaaaacagctgagatggagaccggatccaaggccaagaagggcgccggcggacgcaagggcggtccaaaggctaaatcggtgagtcgttctgtaaaggccggacttcagtttcctgttggcaggattgggcggtacctcaagaagggtcgatatgctcagcgtgttggttcaggagctcctgtctaccttgctgccgtccttgagtatcttgctgctgaggttcttgaattggcgggcaatgcggccagggacaataagaaaaatcgaattgtgcctcgacatgtgtgtttggcggtgagaaatgactaggagcttgcgaggttgttgggtggtgttaccattgcccatggcgggagtcttcccaaca

SEQ ID NO: 2578 - DNA, 406 bp, Lilium asiatic
  Clone ID: LIB3229-047-P1-K1-F8
gtgagattccaccaaccctatctgacctccaaaaccaagtcatcctcaacctagccttcaatggcttctctggaggaagcccaacaggcttcaacaatctccggttaacttcctgacctcgatctccctaggatctcatagttcaatatctcctacaaccaattcatcggctccataccgaccagcctccacaagtggcccagcagcgctttcctcggcatgcctctctgttgccgaagtggtatcttttgtccctcggcatgtctctctgttgccgaagtggtagcggcggcggatgagcccgtggagagaaagcctgctgtctctccggtgatgaacatggtggcggcgaaggcggagaagacggtagcggcggcgccggtcgcggctgtgacacctgaggcac

SEQ ID NO: 2579 - DNA, 425 bp, Lilium asiatic
  Clone ID: LIB3229-047-P1-K1-F9
atggccacagcctcagcagctccgatagccagccagctgaggagcagcctgctcagctccaccacaaagaccctccttgccactcccaggggcatttcaggaactcccctcagagaccttcactccaagaggagaacttccctcacagtcgtagctgtcagtgcagagaagccaaccaccttccaagttgtgcaacccatcaatggcgaccccttcatcggcagcctcgagactccggtcacctctagccccctgatcgcctggtacctctccaacctccctgcctaccgcaccgccgtcagcccactcctccgcggcatcgaggtgggtctcgctcacggtttccttctcgttggtccctttgtgaagactgggccgctgcgcaacacagagtatgctggcgcagctgggtctctagctgcggg

SEQ ID NO: 2580 - DNA, 417 bp, Lilium asiatic
  Clone ID: LIB3229-047-P1-K1-G10
cttgaattggccggaaatgcggctcgggacaacaagaagaaccggattgtacctcggcatgtgtgtctggcggtgagaaatgatgaggagcttggacggctgttgggtggtgttactattgctcacggtggggtcctccccaacatcaatcctgttctgctgccaaagaagaccggcaaggaggggactgagcccaagtccccaaagaaggccactaagtcgcccaagaaggcttaaatttgttgttgtgacttgtccgatgtatgtatctaatttcctaggttttctgttttgttccggaaaaagttaaaattatgttgactttaaaggtgtagaaggattagtaattatctatttttaagttgtttaatttatggtatccctttttgttactttgattttgttgctgttgacgat

SEQ ID NO: 2581 - DNA, 417 bp, Lilium asiatic
  Clone ID: LIB3229-047-P1-K1-G11
gtctcccaatcaaggaaatatattacgagggatacgccctgattcaccaggtgcagtgcataggaactttgcaatgcaaactcctggttatattggctcggcatatcctcctatgcctggtgttcagtatcctctagccttctctggtggcatgatgaatcaaaggcctttaagcaactctcatgcccaagcccaacatatgaacactgacaataacacaacatcttcaggcatcagctccagttccgggggtcagatcgaaggtcctcctggagcaaatttatttatctatcatatccctcaagagtatggagatcaggaactttcaaatgcctttcaggggtttggcagggttttgagcgctaaagtttttgtcgacaaagtgactggcgttagtaaatgctttggttttgtgag

SEQ ID NO: 2582 - DNA, 288 bp, Lilium asiatic
  Clone ID: LIB3229-047-P1-K1-G12
agcctagatcgcaagcgatggttctataagagccaagcttacgttctcgtgcatgaggcgcaataactctcttatagcactaccttaatccacagaaccagccgacaacgtacagcggaaagactcaccaaaccgtaggactgcccatcttataagcactgctatacatagaaatatctccagacaagcgttctatcagataagcgcgatccgagcgcccttaccaacaagggcacaggctgaatgagctatgggaacctccctgtgatctcgcatttaacacactta

SEQ ID NO: 2583 - DNA, 412 bp, Lilium asiatic
  Clone ID: LIB3229-047-P1-K1-G3
gttctccacattgcacgcgaacgtctctacaccatcggcatcggttgtttgatctgccttttcatgagcctctttgtcttcccaaactggtctggagaagatctgcaccattccactgcatacatatttgaaggtttagcaagatccattgaagcttgtgtgaatgactatttccaagacaaggaagtcgaagttacagaagaggagtcagcataggatccactagacgagggttacagaagagtactggactcaaaatcgagtgatgaggccttggcactcttcgcaagctgtgaaccgagacactcaagacattgccaccgatatccatggcaacaatacgtgaagctcggagctgttctgaggcattttggatatactgcagtagcgctccgtggctgcttggattctg

SEQ ID NO: 2584 - DNA, 423 bp, Lilium asiatic
  unsure (1)..(423): unsure at all n locations
  Clone ID: LIB3229-047-P1-K1-G4
ttcaagaggaggtagaggcttacaagagaaatgcttcagatattgcttgttcaggggtccaataacataacaaatctggatcaattacagctcttttgatggaaaatttatgctccaagaaatttttgctcgccatggagaatgtttgggatgatgctgataggcagaatggaatatgctatgtgatccccttgaatttggtaaacctggaagcaggatcttgcttgcttaccactcggctcgacactgttgtgagaatggtgggtaaaattattgatgtgttggactgctcgataaaattgaagggtttatctagagtggagtacttatccttgttcagcaagtgcgccttcgacaagtagaaaagaattatntttctttttatcatttatcatttgttaagtatgatgtatgtattgctag

SEQ ID NO: 2585 - DNA, 304 bp, Lilium asiatic
  Clone ID: LIB3229-047-P1-K1-G5
atcagcttcatatggttaccctaactttgataatcatgttatgcctaaataacaaccacaagcatgcaattctaaagaaaattgtgagaagagattgatatttagtagctaatttaagtttacagtgtgtgccaagattcaaataagggatagttaattctaaaatgaataggggtgctttgtttcgttaatttttgtccatgtaataaatctatttcttttaatttttgtccatgtaataacattatttattttaacataactttcgtgaaataaaataataataataaaaataaaccttcca

SEQ ID NO: 2586 - DNA, 421 bp, Lilium asiatic
  Clone ID: LIB3229-047-P1-K1-G6
acaacttcacaaccaccttcaccctccaacaccggcaaaagcttcatcaaggtacatctatctactctcttgtcccctttatgtcttatttggattgttatgtgtaggattttggaaaagctcggatttgtgtggcaaaatgaggaaatgatcaaagctcaagaaggaaaagagatgttgcaagcttgatgaggatgtgctctcggatctataagtacccctcctcccccatcggattgaaggaagaggtctcactccggaccgagtgggggagggcacattgttggccgtctttctctcggttttggaggaggcacattgggagagcatctacaagtgatttcggagtggagagtttatcatggttcttatttgtgggtctttgttgagctttgagagagtcatgtaagtggagtttgta

SEQ ID NO: 2587 - DNA, 233 bp, Lilium asiatic
  Clone ID: LIB3229-047-P1-K1-G8
cccacgcgtccgcccacgcgtccggccgtgccgcgagcgtctcttcggggttagcacacaagcagcctgatgagcgtataaaagaacactactagcatttcatggatatgtggatagttagccattgtattttcatcattatcattacgtgcttttagttgtgtatctggtgacaatgcaatgtggctgaattgtgatactataaggtgccaatgaatcagagacatagtgac

SEQ ID NO: 2588 - DNA, 374 bp, Lilium asiatic
  Clone ID: LIB3229-047-P1-K1-G9
cgccgcctgaagcaagagaggtccagcgagagatctgagctcgatcgcccgaagatgagggcgaagtggaagaaggcgaggatgatgaggcttaaaaggtagcgcccaaagatgaggcagcgatccaagttgatcctgatgcaccggccttcatcatgtggaagatagtcgatggtcttacatattgccgaactttcatcttgctgctggtttatctgttgatgtctaacatctaaatttcctgttttgcagctttagtaggttctaagactttaaatgctatgcttctgttgacaatgcttgagacaatggtgtcgcaccatatttgacctcttttgagacgtttaatgttgaagcgtcgctctttgtagcct

SEQ ID NO: 2589 - DNA, 267 bp, Lilium asiatic
  Clone ID: LIB3229-047-P1-K1-H10
gtctagatctcgaacgaaaaacgctgtgtattaagatgacatacgcgtacatgggaggttataacagttctatggactaacctaaatacaaatcaatggccgacgaaagacaactgaaaggcgaggaaaaacctaaactgacgcaacctaatagaatcaatgaacatgctccgttattcagctggcttggttgaaaaaaagccatgcccgctggaaccacccaacagtggctcaaacagtattgggcatgggtcaaaccctgaaggg

SEQ ID NO: 2590 - DNA, 270 bp, Lilium asiatic
  Clone ID: LIB3229-047-P1-K1-H11
gcgcccacgcgtacgggaacagaaaggggtccaaacaaggctctggcattaagcttttgcgaatctagatcaattgcttaatcaagattacacatttttcatagcttggatgttgggatgcttctgttgcttcaattcgtcagttatcgtcttcccttgtgtaagaagaagctatttcggatagattctttggtgggtagcgacactggtattaccttttctgtctttcaagtactagtttctttattgtgtattctaggttgtgtttgc

SEQ ID NO: 2591 - DNA, 342 bp, Lilium asiatic
  unsure (1)..(342): unsure at all n locations
  Clone ID: LIB3229-047-P1-K1-H12
ggaacataatagaagacatatatggcgaagtaaagaacaattggtctgtgaagtaaagaagttaaattccgggataaaattggcatcaaattaatacctgaagttggatcaattgataataagttttgggtttattgaataatgggaagataaactatcggggaagccaaattcatctaacttgttttgtatgaaaatcatatacttttagtaacgatgtttagttttaccttattgggcgggcttttatgatgtattagttttgtgtagggatatgggtacggagttttcttctactcgtaagattctctacttaataaagttttacctttaaannaaaaa

SEQ ID NO: 2592 - DNA, 425 bp, Lilium asiatic
  Clone ID: LIB3229-047-P1-K1-H2
ccacgcgtccggcaaaacagtatttattctgggatttggggctataggtgtcgatcttgcaaagagattacgtccatttggtgtgaaaataattgcaacaaaaagaaaatggccttcggattccttggagctaaatggttctcaaagtgagatatttcatgatctagttgatcagaaaggtggtcctgagaatatctatgaatttgctggacaatctgacatagttgttccgtgcttgaccttaaatgcagaaacagctggtattgttgatgacaagtttctttcttctatgcgaaagggttcccttcttgttaatattgctcgaggtggaatcttggactacaagtctgttcgtcatcaccttgaatcaggtcacttgggaggattagcgattgatgttgcttggaatgagccatttgatcccg

SEQ ID NO: 2593 - DNA, 384 bp, Lilium asiatic
  Clone ID: LIB3229-047-P1-K1-H4
ttcaagaggaggtagaagcttacacgagaaatgcttttgatattgcttgttcaggggtccaatggcgtatcatatctggttcaattacagctctttagatggaaaattgatgctccaagaaatttttgctcgccatggagaatgtttgggatgatgctgataggcagaatggaatatgctatgtgatcccattgaatttgataaacctgaaagcaggatctttcttgcttaccactcggctcgacactgttgtgagaatggtgggtcaaattattgatgcgcttgactgctcgataaaattgaagggtttatctagagtggagtacttattcttgatcaccatgtgcgccttcttcaagtaaaaaagatatatttttcttttta

SEQ ID NO: 2594 - DNA, 415 bp, Lilium asiatic
  Clone ID: LIB3229-047-P1-K1-H6
gcggcctcgacccctctgaatccctagaaacccttgcagccgatcccaaacccagcagtatctgtagagatatcggccccaggggtggacagaagacatgaagccggcgcccgatcagggcgctcacatcaatctcaaggtcaagggccgaaatggcaataggtacttcttcaggatcaagcgtagcactcagctcaagaagctgatgaatgcatactgtgaccgccagtcggtcgacttcaattctattgactttctttttgatggccgcaggcttcgcggcgagcagacccctgatgaatttgaaatggaggaaggagatgaaatcgatgctatgctccaccaaaccggtggtgcgaagaatgaagcatgatcagataatttagctactgtggagatttaaatgacagcgaat

SEQ ID NO: 2595 - DNA, 102 bp, Lilium asiatic
  Clone ID: LIB3229-047-P1-K1-H7
ctgtgtgattactaccattcctgatgtcattaggcatcttgaaatatgtcttgcttttagtaatatacttataccaaatacctattataatctttgttggtg

SEQ ID NO: 2596 - DNA, 281 bp, Lilium asiatic
  Clone ID: LIB3229-047-P1-K1-H9
ttctagattgcggtggaactgcttagaaggtgcaagatgacattctcgtgcatacgaggtgataggtgtactatagtgtaaacttaattcaatgcaatgtccgagattagacaactgaaatgctgggtaatccgtaaactgacgcaacttaatagaatcgcagatcattctcttttggacagctggcttgattgaaagaaagtcatcacggatcgaaactgcaatctgtttatcaaactgtattgggcatggttaccgacgtgtcggggatcattaagcgc

SEQ ID NO: 2597 - DNA, 307 bp, Lilium asiatic
  Clone ID: LIB3229-048-P1-K1-A10
gctattctgctgcgatggattatgggatttgtagggtcgagatttgagtcctggtacggtcgttaatcggaggcaatgacctgaggctattttccttttgtacatatgaatattttgtctgtgattcctggggtcttttggttaatgagagagtccttggaaaatttatatcagtgcttgtatgtgtcgtcgccaaactgaaaatagggtttgtatgaaaactggtcattacatagaaactcggttttgatagcgtgtttgaaattgtagagtgggcagaagtgagcccagctgattatatggtttc

SEQ ID NO: 2598 - DNA, 407 bp, Lilium asiatic
  Clone ID: LIB3229-048-P1-K1-A2
ggaggcgaagcagagcaatctctgcttggcagcggacgttgctactgctgaggagctgctcactttggcagacaaggtaggaccggagatttgcttattgaaaacacatgtggacattttacctgattttacactggactttggttcaaagctccgtaagattgcagaactgcacaactttttgatctttgaagaccgtaagtttgccgacattggaaatacagtaactatgcaatacgaaggagggatattccgcatattggattgggcagatattgttaacgctcacatcatttctggtccaagaattgtagatggtctgaagttgaagggtttgcctcgaggcaaaagacttgtgttactggctgaaatgagctcagctggtaacctcgcaacaggagattata

SEQ ID NO: 2599 - DNA, 369 bp, Lilium asiatic
  Clone ID: LIB3229-048-P1-K1-A4
ctcagttgctgaagacgagcttatgaggatactcattcttgtccggaatttcttacctggacaccatcaggtgataaatggtgaatgggacgttgcagctattgcatacagggcttatgatcttgaggggaagactgttgggactgttggagctggtcgcattggcaagcttttactccagcgcctaaagcccttcaactgcaaccttctctatcatgatcggcttaagatggatcccgaactggagtcagctataggggcaaagtttgaggaagatcttgatgctatgcttcccaagtgtgacataattgtcatcaatacaccccttactgagaaaacaagggggttgtttgacaaaaataggattgc

SEQ ID NO: 2600 - DNA, 410 bp, Lilium asiatic
  Clone ID: LIB3229-048-P1-K1-A6
attgcgatgtggaggcctggctacttagtcacggcactcccagctggaccctcaaactctgtagtcgatcgtggacttgatcgaggagtgcgcggcgcggcggcgatggggatccgcttcgtgctgctggtgaacaagcagggccagacccggcttgctcagtactacgagtaccttaccctcgaggagcgccgagcccttgagggcgagatcgtccgcagatgcctcgcccgcaccgagcagcagtgttcatttgttgagcaccggaactacaaagttgtgtataggcgctatgcgtcactttttttcctagttggggtcgacaatgatgagaatgagttggcaattcttgaattcatacatctattagttgaaaccatggatcgtcacttcggaaatgtgtgcgagct

SEQ ID NO: 2601 - DNA, 395 bp, Lilium asiatic
  Clone ID: LIB3229-048-P1-K1-A7
tcggcccacgcgtccgggtggcgaagcagagcaatctctgcttgggagcggacgttgctactgcttacgagcggctcactttggctgacatggtgggacctaaaattagtttattgaaaacacatgtggacattttaccctgttttacactggactttggttcaaagatccgtaagattgcagaactgcacatctttttgttctttgattaccgaaaggttggcgacgttggaaatacagaacctatgcactaccaaggagggatattgcacatactccggttgcgcagatattgttaacgctcacatcatttttggtccaggaattagcgatggtttgcagttgaacgtattgcctctcggcaaaggactgttgttactgtctgaaatgagctc

SEQ ID NO: 2602 - DNA, 405 bp, Lilium asiatic
  Clone ID: LIB3229-048-P1-K1-A8
cagctaataacagaaattggtggtaaacaaattggtgctgctcacagcaaagatttatgcagggctttattcgacatgtatatcggtgatggtcccgtctcggtgcaggccaaacagcaacttgcccaaaatatcgacggctttataaggagatgctagggcctaacactgtcagattgagtaggtttacaggcaatatggatcagttggttatttgaggtcctttaaatgtttttattcttttattaacttaactttcgaagttatgtgaatcaatatttaatacaataaaaaaagaaaaaaaaaggagttttagaataaaaaaacgagtattcacattgagttgtagaatctcaacctgtagcagtcatgataggaaaaatgactgtattatgctctaataag

SEQ ID NO: 2603 - DNA, 355 bp, Lilium asiatic
  Clone ID: LIB3229-048-P1-K1-B1
aacgatctcgcttttgatgatgatcgagcttgcttgaggctgttggacactttactccggtgatgccagtacgatgtgacggtgactgacagggctactattgctttgaagctgttgagggagaataaagaccaatttgatctgggtataagtgatgaccaatttgatctgggtataagtgatgtacatatgcccgacatggatgagttcaagcttttggagtttgtcgggttcgaaatggacctcatggtcatcaacaagccacttgctaatatttcccaatttttgttactgctagattatcatatagatgagttgattgataaaaaaaatatgaagcgaaattaagggaaat

SEQ ID NO: 2604 - DNA, 407 bp, Lilium asiatic
  Clone ID: LIB3229-048-P1-K1-B10
aagagaagtaggaaaatgagtgacattcagttcatcttgatcctagcattgctgcttgggctggggtcctgcgaggacttgcagaccaagtgctcgccggagctgacaaagctgatgtcgtgcctgaactacgccaccgcccaggccgatgccccgaccagtgagtgctgcacttccgtggctggcatacgggggagtgaccccgaatgcctatgctacattattcagcaagccagcaagggaggtgctactacgaagagcctcggcctgcagatatcccgcctcctcctgcttccccaggcatgtaagctgactaatgccagtgttaacgactgcccaaagcttttaggcttgcctgcgagctctccagacaatgccatcttctccaatagtaccaaggctgctac

SEQ ID NO: 2605 - DNA, 393 bp, Lilium asiatic
  Clone ID: LIB3229-048-P1-K1-B11
ctggtatatctgctagtgagaggataaggcgagagagtttggttgtgaccacccgtaatttggttatggagaaaatgaaaattggtggaccgtcgaaacgtgtgggagagatgttagaggagctaaagaagcaaagcccggtggatattcatatgagtgatttgcggaatgctctctcgactctcatgagcgaagggcttgtctcttttcatggcgatgttgttaagcggatttgaaagtgcccgagctatattatgctgcgatcctttgggttaagttaaaattaatctaaaggttggagtgctaagtgcatgtgggtgagaattgaactatgggatgcttttctcaggttttatgtattttgttatgtttgagaatagtaatttttgagct

SEQ ID NO: 2606 - DNA, 345 bp, Lilium asiatic
  Clone ID: LIB3229-048-P1-K1-B12
cggacgcgtgggctcgtaggagtgtgagtgatgcggatattaggaagtaccaggctttcgcccagaccctgcagcagtctagggggtttggtacagagttccgcttctctgagcgcccggggtctgggggaggcggtggtgctgctaccgacccttttgcagcttcagctgcagttgcggatgaggatgatttatataactaggatgtcgcaacctgtgccataaactttatctttctgttatcttttatgtttgtcatatattattaatcttagactttcatggtgagcctgccggctgtactctttacctttttaattttgtaatgtaagaagttttaacttt

SEQ ID NO: 2607 - DNA, 402 bp, Lilium asiatic
  Clone ID: LIB3229-048-P1-K1-B2
ggacctcgaggagctcaagggctgcctcgacctcggattcgggttcagctacgatgagattcctgagctctgcaacacgcttccagctcttgagctttgttactcgatgagccagcggtttctcgacgagcagcatcagcgatcgcctgatggcgaggcgccggagcgcacccctagtagtgcaccagcttctcccattgctaattggaggatctccagccctggagacgatcccgatgaagtaaaagcaaggctgaagtattgggctcaagctgtggcttgtactgtgagactatgcagctgacattggttgtatcctatatgcggtaaccagcagcatgaatattgactaaattcctcttccattgttaatccactcaacacctgcaagtctttctagag

SEQ ID NO: 2608 - DNA, 403 bp, Lilium asiatic
  Clone ID: LIB3229-048-P1-K1-B3
agccacttcagctctccagatttcagtggtagttgcttatattctaagatacaaaataactccttgaaatcgtaactgtgtaaaatctctgttttcttttatcctcaaatttggagagcaattgtaatttattatactgaagcatcctagcctctttagattgtcttaatcctatgtccttatctcatgcctatccatatctgtgcattagaactcgagagagaattatgaccatgaatttccaatgaacatatgtttatttaatattgtccatcttatgagtcttgagtaatccgtaatttgtgtatatggactagggtagttaaaaggcatttatgttagagtttcctacttctgaaatgtatgtttaattgctgttaatctccagttacatcatagttta

SEQ ID NO: 2609 - DNA, 411 bp, Lilium asiatic
  Clone ID: LIB3229-048-P1-K1-B4
ggagggtattcccccggaccagcaaaggctcatcttcgctggcaagcagcttgaagacggcaggacccttgctgactacaacattcagaaggagtccacccttcatcttgtcctcaggctcaggggagggatgcagatttttgttaagaccctcactggcaagaccatcaccctggaggttgagagctctgacactattgacaatgtgaaggcaaagatccaagataaggaaggcattccccccagaccagcagcgactcatctttgctggcaagcagcttgaagatggcaggactcttgctgactacaacattcagaaggagtcgactcttcatctggtccttaggctgaggggtgggatgcaaatctttgtcaagaccctgactgggaagactattactctggaagttg

SEQ ID NO: 2610 - DNA, 393 bp, Lilium asiatic
  Clone ID: LIB3229-048-P1-K1-B5
gtagctgctcagcaatcctattgcctatagcagggatctagtctcaaattatgcgcaataatacctatcaatgcgatgtttaatttgtagctgctaagcaagctttttgcctatagcagtgatctggtctcaagttatgcacaataatgactccatgtttaaatcagaaatctatagtggttgggctgaaaaaaaaaaaaaaaaaaaaaaaaaaaaaaaaaaaaaaaaaaaaaaaaaacaaaaaaggaagaaaataaaaaaaaaaaacaataacaatcaaaataaaaaaaataaaaaaatgtttgtgagaaaaaataatattaaaggggggggccgttttagaggatcaaatttttcttccgcttgtttgcaaagttatactttttttttggg

SEQ ID NO: 2611 - DNA, 410 bp, Lilium asiatic
  Clone ID: LIB3229-048-P1-K1-B6
ggcagttctaagaaaaaaggttctaaatctgaaggaaatgctaaatctgaaactcccaaaggcaaaaggccaaagaaagataaaataatagtgatagacctcgaggacgatgaaaacaaccccagctccggctctggtggaacaggaccgagaaccccacctagtgcgcggcgcattcgagtgatgcggaaacttggtctgattgctccagaagggtccccatatcgcagattgaaaatcgaaaagaaatgacctgttgaaggtgaactaatcccaccaactccttcaagtttgtatagagggcagaaaccagcagtttgaagggcagtaccagaaactatgctactctaaagaggcttgtttctaatttgttgttaaagtctgtcctagtgatgatctctactctaacc

SEQ ID NO: 2612 - DNA, 310 bp, Lilium asiatic
  Clone ID: LIB3229-048-P1-K1-B7
cccacgcgttcggatgctgggaagcaagcagaggtgtggtcataaattgtgtttgaacttccagaagaacatcctctgtctgacaccagaccactgcgggaactgcttggtcatactcctctacaggtgattgctggggagttctggggctcgttactgctgtcatcgggcgctttatcagtaaaactgccactcaaactaactcctgtaccagttgccattatctgagaaggatagtagttgagatatgtgtttcatccccgctatttagattggacatcaacatatcgcaaatgactgtttagcaaaa

SEQ ID NO: 2613 - DNA, 401 bp, Lilium asiatic
  Clone ID: LIB3229-048-P1-K1-B8
gcgaccttccaatcttcctccatcgtcaacctccttacctgatggcgactcctccactacggcgagcttacttcatggccaaggaagaagacgagggcgactgcagtgaagacgacatctgaagcattctccaccgtctgcatgcaccaccagtgagctccagaagactcgagaggatgaaccagagagccgtcaatccaatcaaggtaagatttacttcgatttagtactaattcttgtctctttttatagaaagtgtggatctataaaaggccgagtagatcaagtgaagaatatcatcggggggtgttcccctggggggaaaggcaaagctatggcggttctcatgggaagggtttagattagattgagaatgtgagattcaagagtttatgtaataa

SEQ ID NO: 2614 - DNA, 403 bp, Lilium asiatic
  Clone ID: LIB3229-048-P1-K1-C3
atcaagggagacatcaaccttatgcatcaaaacaataatgatcgaggcgcccgtagctacatcccggaaaagtaaagtaaagagacctaacggtcaggatccgtagaagttgccgagatgttcccgaatatcccaaatcggacggtgcacatcaggactcgtattttcatctacgtctcttcgccctatcacttcccggccgccacgttttctagggtttagtcctcaccgccgccgcgccgcaccgtgactgtcttctccctgcagccgcctcgtcgcaccgtgactgtcttctccctgcagccgcctcgtctgggttggatcccaaggctaaagtctgatggcagatgcggaggtagttgctatggatactgattcaacaacagtaaaggtagaacaactc

SEQ ID NO: 2615 - DNA, 275 bp, Lilium asiatic
  Clone ID: LIB3229-048-P1-K1-C5
aaaatctgaacttggcttatccgaagatgattgatgtagcagttccagcaaatatggtgtgtggattacaagatcttattacaaaggcttaggtgaggtgatgccaattttaagcctatcggttgcgactattgagtatgatttttgtatagtatttgtgccactgagtagaaactttaatttgttaataaaatttgagcctgaggatttttatctttaatgtcactgtatctatggatgggtcatataagtgaagtacagattatttgtgcttt

SEQ ID NO: 2616 - DNA, 277 bp, Lilium asiatic
  Clone ID: LIB3229-048-P1-K1-C7
gtgccgccgtcgccgctgccgctgctgccgcccgccggagaaatggccgttccgcttcttaccaagaagatcatcaagaagcgcgtcaagaagttcaagaggactcagagtgatcgcaagatatgtgtcaagcgaagatgtcgtatgccccaagggatttactctcccgtgtggggaggaagttgaagggagtatctttgacgaacaatatttactgctggtacaacaagaacccccattacctccccaatggtgtcaagaagattgtagttcacaa

SEQ ID NO: 2617 - DNA, 405 bp, Lilium asiatic
  Clone ID: LIB3229-048-P1-K1-D1
cggacgcgtgggctgaggccatcatcaagcagattccacgtcttctaggcccggggcttaacaaggcagggaagttccctacactggtgactcatcaggaatctcttgagtcaaaggtgaatgagaccaaagcaatggttaagttccagctgaagaaagttctttgcatgggtgttgcagtagggaatcttggaatggaagacaagcagatctttcaaaacgtgcagctcagtgtcaattttcttgtttccttgctgaagaagaattggcaaaatgtgaggtgcctgtacctgaagagcaccatggggaagcctgtccgagtgttctaagcagagttcctttcttatagttctttgaagaggtttaagttgtaggaaatacctgtctgttttgtctgcaaggctt

SEQ ID NO: 2618 - DNA, 407 bp, Lilium asiatic
  Clone ID: LIB3229-048-P1-K1-D11
ctcagcaaggtcaaacggctccagggtacggtcaaggtggacagcctgtgcctgcttatgcccaaccaggtttgcagtctggtggttatgcacagcagtacccacaatcccaacccggctatggcaaccaagctcctcctccaagcaatgtaaattacggatatcaaggagggccaactgatcccagttatgctaacaatgcccaggtttcaggatatggtgcaactcctacgcctggtggccagccaggttatgcacaaccaccgcctggctactatgagcagtcggttcctacccaatctggtcaggcaaacatgccagcgactgcacctgttggttacacaaagagtttgtccccaggcccacagcctggttatggaggacaggtttatgggcagcattgatgc

SEQ ID NO: 2619 - DNA, 404 bp, Lilium asiatic
  Clone ID: LIB3229-048-P1-K1-D2
ctcgaatctgtgctcaatcccttgctcgaatcacaagccacaatcagagaggaatccgcggccgaaactcaacacaacaatattgatgaagattgatcggttatgagctttctcagctataacctgaaggtgaagagctttttttgctgggacatcacccatatgatcattctgaagatatattgtttgaaactagttttagatggatacattgcctgaagcttgttctggatacccttcgttgtagtctcatcaacaaagttgtatgctatattgcgggacatatacaaatagatcgtactgcatgccttttgatccatccggtttcacttcacaatgtcctcggcggtaggcgccagtgtcttctgtttaacaacatcaaatgtggtcggtttccgtcttgg

SEQ ID NO: 2620 - DNA, 406 bp, Lilium asiatic
  Clone ID: LIB3229-048-P1-K1-D3
cgcgttcttcaacgagatcaaggctctgcgcgtccgcgacctgccgaagtacctggagccgaagctcacatgggatcacatcaagaagacggccgacagcgccgtcgatcgctacatcgagaagtacatcgagaccagctccgtcgagcccctcttccacgtctgcatcggtggcatgatcttctcgtacctggtggcgctccccgaggagcgccgccatctggagcatcagcagcagcttgccgccggcggcgggggcggccaccactgaagctgatgcgtcagatctcaggatggagtggctggaggtgacgactggctgtccgtaaaaatatgatttgtggctgttttgttagattttgctcccgaaataagttcagcttgcttttgactgataattttctgt

SEQ ID NO: 2621 - DNA, 163 bp, Lilium asiatic
  Clone ID: LIB3229-048-P1-K1-D4
cccacgcgtccggcaccctctatggatttgggggttgatccagcactgttctcttctgggtttggtggtctatatctgatttgggtcgtttcatattactggtttgtgaaatgaaatgtcgtcttggttggtttgtgaaatgaaatgtcgtcttggttggttt

SEQ ID NO: 2622 - DNA, 407 bp, Lilium asiatic
  Clone ID: LIB3229-048-P1-K1-D5
ttttgcgtctcggtgcctcttacatttgtcggtggatactttggagccaaggcaccacacatcgagtaccctgtgagaactaatcagatcccccgagaggtccctcctcagaagtacccgtcttggttgttggttcttggagccggcactctgccctttggcacccttttcattgaacttttcttcataatgtcgagtatttggatgggtcgagtctactacgtctttggttttctctttatcgtgatgtcattactcgttgttgtttgtgcggaagtctctgtggttctcacatacatgcacctttgtgtggaggattataagtggtggtggaaatcattcttcgcgtccgggtcagtggcgatatacatcttcttgtactcgattaattatcttgtgtttgatct

SEQ ID NO: 2623 - DNA, 401 bp, Lilium asiatic
  Clone ID: LIB3229-048-P1-K1-E10
gacctgatgcagagattttgattcttggctgtgggaggaatattgagtttctggatcccgatctccgccgcttcattaggtctactggcatgaaattggaagttctcgactcgagaaatggtgcatctacttacaacattctgaatgaggaagggagaatggtggctgctgctcttctcccatatgcaggtacttcatgaaactttctcacctggtgtacaagccaagaactgtcggtcctcatgtctgtagaatttgatcttcccactaagttctgcatatttgaagaaccttctagtcctctttaaaccctgtgatgctcatatgtttctattttaacccgaagatgagttggaattgttttttcccaatgactgtaggatatcaatgcatactcattt

SEQ ID NO: 2624 - DNA, 401 bp, Lilium asiatic
  Clone ID: LIB3229-048-P1-K1-E12
ccaccttccaacaactccacaaccaccttcaccctccaacaccggcaaaagcttcatcaaggtacatctatctactctcttgtcccctttatgtcttatttggattgttatgtgtaggattttggaaaagcttggatttgtgtggcaaaatgaggaaaggatcaaagctcaagaaggaaaagagatgttgcaagcttgatgaggatgtgctctcggatctataagtacccctcctcccccattggattgaggtaagaggtctcactccggcccgagtgggggagggcacattgttggccgtctttctctcggttttggaggaggcacattgggagagcatctacaagtgatctcggagtggagagttcatcatggttttttgttgtgagtctttgttgagc

SEQ ID NO: 2625 - DNA, 357 bp, Lilium asiatic
  Clone ID: LIB3229-048-P1-K1-E2
cccacgcgtgcggctccccttgcagcgcctcgttcgtgagatagctcacgactttaaggccgacctccgcttccagagttcggcggtggcggcgctgcaggaggcgtcagagtcataccttgtggggctcttcgaggacaccaacctgtgcgctattcacgcgaagagggtgactatcatgccgaaggacattcaactggcgaggaggatccgtggggagagggcttgaagattagaggttgttatttgctacttgcaaatatgttggattttctgattgaatttgtgcgggaagatgcttggcttgcgttatctcgggaattgcagtctttggtggattaatatgaaacataattc

SEQ ID NO: 2626 - DNA, 323 bp, Lilium asiatic
  unsure (1)..(323): unsure at all n locations
  Clone ID: LIB3229-048-P1-K1-E3
ctaagtttgatcttggaaagctgatggaggttcatgatcacactggtgaggatttgggtgtgaagatggataggcctgctgaggagcctgcancagaggttgagactgagattgtcggtgcttaggcctcccatttttggtttactgttatctccagcaatttaattgcagcaggaacttgtagggctatatgtggtaacttaatttaaggtaagttgtctggtggtttcttgttcctcgctgtggggagaattttcttatatgcaatatgtactcctaagatattggaagtttggttttagcatttctgagttgtgattttt

SEQ ID NO: 2627 - DNA, 410 bp, Lilium asiatic
  Clone ID: LIB3229-048-P1-K1-E4
gccagaatgttatgtctacaatattaagctcgaagaattttgtgtctttgtgtgatttgacttatggaaccttccgagataaaaaggctagtgagatgctagacttcagcctcattaacaaaaggatgttgaacggggaatatggaaggtcgcctgaactatttgatcaagatattgaacaggtgtgggaaaggatcctgagttttggtcaggagatgatgcttcttgcaagtaacctctcaaacatttcgccagtttactctcagaaacaggttgcagaaggtatggtatgcgaggttggtgagcagatattcgaggagaccggtcaagctggcgttgaacaaaggaactcaatggagtcgaacacaatacagtatgagcagatgattttacagcaacacggtaggatt

SEQ ID NO: 2628 - DNA, 167 bp, Lilium asiatic
  Clone ID: LIB3229-048-P1-K1-E6
acgactccaacaccctctggggggggatcaaagtgcatgtatctactttcttgtccccttaattaaaatattcaggatctgtcatatataaagcatactggacaaaacaaaagatttgtcgtggcaaaattaggaaaggatcaaagctcatcaaggcaaatagactt

SEQ ID NO: 2629 - DNA, 387 bp, Lilium asiatic
  Clone ID: LIB3229-048-P1-K1-E8
ccgattgccatctcaggcggctggtgggtcagcagttgatccctatggtggtggtgccggtgcttcctatggttctgctagaggacctgcaacttctgctcagcggtgaatgcaggagttatctcatggtcccgatcagcagtaaaggctggagtgtcttgtgatttcggtcaggatgtcgcaatcgtgttattattttcagactcagattattggtaggactagaatcgtcagacttggattggtataacttagaagtgtttgttgtgtgttcgaccctgtcccagagtatatgattttgataaggcggtctgactcgtggaggtctggagatgttatcaaactgtggttaggttaaattaagacttccacttatttctgcaggat

SEQ ID NO: 2630 - DNA, 400 bp, Lilium asiatic
  unsure (1)..(400): unsure at all n locations
  Clone ID: LIB3229-048-P1-K1-E9
cagcaatcgagcaatgtcaggacgaggcaagggtgggaaggggctgggcaagggcggtgctaagcgccaccgcaaggtgctccgtgacaacattcagggcatcaccaagccggcgatccgccgtctcgctcggcgcggcggcgtgaagaggatcagcggcctcatctacgaggagacccgcggggtgctgaagatctttctcgagaatgtcatccgcgatgctgtgacctacaccgagcacgcccgccggaagacggtgacggcgatggatgtggtctatgcgctcaagaggcagggaaggacactctacggcttcngcggctaaagggatgagggtaggtctagtctagggctagggtttctgctttagtttactagttattggttggctttggagaat

SEQ ID NO: 2631 - DNA, 84 bp, Lilium asiatic
  Clone ID: LIB3229-048-P1-K1-F10
gcggggcccacccacccgtccacaacgatccttcgcaaaattccgggtctctcgtgccggattacgcaattctctcgcggtaaa

SEQ ID NO: 2632 - DNA, 383 bp, Lilium asiatic
  Clone ID: LIB3229-048-P1-K1-F12
cccacgcgtgcgtctacttattgcgagatgacccgatcgatctgttacaccgagcgacccatgatcgcattgtgctggctattctatctggcattactgatgtagcttacggggtccactggggcagcgttgaatgtgctgaactcgcttattgtcggagctgatatcgctggagttcatgcggcgttcaaggacacggaggatctgatggatgatcaggacgtagcggatggggactagctatccattgccagtagctcatagtcaggccgacgctacgtcacgtaaagcgagtttttggatggtatgactctcagtcgagcaaatgcacgcttgaatgcctgaggaggcagttctgtcgacattgcatcatctgaataaag

SEQ ID NO: 2633 - DNA, 160 bp, Lilium asiatic
  Clone ID: LIB3229-048-P1-K1-F2
aatgaatcatgttgtggtacacagatcaatcttagttcatgtctttcaaatctacttttttttattaattagtttaatcttattagaatacttgttttttgctagtttttttttcttttctttttgaggagtttgtttgttgctagtttcatgttctcat

SEQ ID NO: 2634 - DNA, 409 bp, Lilium asiatic
  Clone ID: LIB3229-048-P1-K1-F3
gcgagctgaagagtgaattgaaagacctgtacattaactcagcagttcaactggatgtagccaacaacaagaaggctgtagttgttcacgtgccctacagacttcggaagtcgtataggaagattcatgtgaggcttgtcagggaactagagaagaagttcagtggcaaggaggtgatcgtgattgccactcggaggatagtgaggccgccaaagaaaggctctgctgttgtgcgtcctcgcagccgcacactcaccgctgttcatgaagctatattggaggatgttgtgtacccagctgaaattgttgggaagcgtgttaggtatcgattggatggttctaagatcatgaagatctttctggacccaaaggagcgcaacaacactgagaacaagctggacacattttc

SEQ ID NO: 2635 - DNA, 409 bp, Lilium asiatic
  Clone ID: LIB3229-048-P1-K1-F4
gcttaccgagcaaatggtatcgggaatggtcaaggagttaacaggtggctataaaataaaataccatgcacatggagtggacaaagatccaattgagattgatttcactccgcccttcaggaggattgacatgattgaaggtttagaaactatggccaacctgaatataccaaaagacattgcgagtgaagaggcaaacaagtatttgttggatgcatgtgcgaagtttgatgtcaaatgccctccacctcagacaactgcaagattgctggacaagcttgtcgggcatttcttggaggaaacgtgtgtaaatccagctttcattatcaatcatccggagataatgagcccgttggcaaaatggcatagatcaaggccaggacttacagaacggtttgagctgttcatt

SEQ ID NO: 2636 - DNA, 140 bp, Lilium asiatic
  Clone ID: LIB3229-048-P1-K1-F6
acacgcgtccgcccacgcgtgcgtgtatttattgggagaggacccttttgtggtcgtgcacacgggcggtaaggggctcggaaggggcgggtctaatcgtcaccgtaaggtcctccgcgacaacatccagggcatcacca

SEQ ID NO: 2637 - DNA, 337 bp, Lilium asiatic
  Clone ID: LIB3229-048-P1-K1-F7
aaaaaaaaaaaaaaaaaaaaataaatgatacaaaattaaataaaaaaaggataaggaaggaaaatatttaatgaaaaaaaaattataaaaataaatataaaaaaaaaaatatttatttggggctgcctttttagagaatccaagtttacgtacgctttcttgcaacttattagtttttttttagtgtaacctaatttaatttaattggccgtctttttacaactttttaactgggaaaaccttggctttaccaaatttattcgctttgcataaaatccccttttcgccagttggcttattagcaaaaaggcccgaaccgttcgcctttccaaacatt

SEQ ID NO: 2638 - DNA, 309 bp, Lilium asiatic
  Clone ID: LIB3229-048-P1-K1-G10
gctgaaggctgtgtcgaaaccaaagactgttgccccaaagccaaagactgctgctgcggctaaggcggtgaagacatctgccaaaccttcccctgcaaagaaggcggctccggtggcttcgaagaaggctaagccggtgaagaaagcaacaactcccaagaaagcgaagaaatagatttatatctgctggcggggttgagttgataggtagcctgatgttttagtatggttattttgatgacaattgaagcacttcaaagcctgtcattttcttaatgacaatatttgattggaaatttgatggttctc

SEQ ID NO: 2639 - DNA, 229 bp, Lilium asiatic
  Clone ID: LIB3229-048-P1-K1-G11
ccacgcgtccgctagcatttcttggtttcttgaaggataaagaaagtgagggtccttatcgagatagtaggcgaagatgaggcgctctattattgtgctggtatatctgatactgtgcctatccatgcatatttgctgcttttatattataaggcacaattgttgtcatctaaatccgctttattacttttatgatatgttgcagttctaaagactaaaagttctggtt

SEQ ID NO: 2640 - DNA, 406 bp, Lilium asiatic
  Clone ID: LIB3229-048-P1-K1-G12
cccacgcgtccgtgcacattgctcttcgttctgatggcaaacccactggagaggcttatgtggagttttcttctgaggaggtggcaaagaaggcaatgtgcaaggacaaggagacgatcgggtcaaggtacgtggagctgttcccctcaaccccagaggaagcaaggcgagcagagtcgaggttcaggcagtgatttaaaactgctccatgctgtgttcgctacttggttcctttctcttcagtaagctggttagttggtctgttgtttctttctttctagactggatattttgtcactgatacttcagtgagggatttggatgcagtagctttaatgtgacagtattggtattttcagtatgtgactatgattatggttttctaattaggttaacagttattatt

SEQ ID NO: 2641 - DNA, 222 bp, Lilium asiatic
  Clone ID: LIB3229-048-P1-K1-G3
cgttagtggcgtctgaacagaaacaactcgatgctgccaaagctcagttacaaaagcgcaatactgcccacagttgagcgaatctatgtaaggtacaaataaatattttgaatttctgatgtttgttaagtgaatacaaattttgcaaatattttcttgtctatttatatgacgggtggcaatattaaaacagttataagagactacatgatatgtttgtgg

SEQ ID NO: 2642 - DNA, 371 bp, Lilium asiatic
  Clone ID: LIB3229-048-P1-K1-G6
gctgaaattaccgataagcttggtctgcattcccttcgtcagaggcactggtacatccagagcgcttgtgctacttctggtgaaggcttgtatgaagggcttgactggctctccagcaacattgccagcaagggttgattgtgagactatggattcccaatctcagagcagtatccaacggcgcagtggattctcttcggtcaccagtctctttgccgtttgttttggacttgatattacctctctagtttttgctgttgtaaaactatatgtttttaagcttgaattgactgcagttactgtcgtaccgtttaaaccagtatatgtttgtgatacccttgtttctaatctgaagaatgttgcactttcta

SEQ ID NO: 2643 - DNA, 403 bp, Lilium asiatic
  Clone ID: LIB3229-048-P1-K1-G7
cggacgcgtgggctgggttctaattcattctctgtctgtgagagttggagatggagagagccacttagcttttacagcgatttgtgatttcattcacaatttcttcatctgtgaagaatgtcgaagtcacttttatgccatgtgttcaagtgtgtcaaccccattgaatacaacacatgatctagccctttggctatggcacacacacaacaaagtgaatgagaggctaatgaaagaagaaaaggatctaggaacgggtgacccgagatttccaaaggttatatggccaacaaagcagctctgcccatcatgttatctttcctcaagtcggtggaatgaggatgaagtgttcaagtttttggttggttattatggcaacacactggtgtcttcgtacaagaag

SEQ ID NO: 2644 - DNA, 407 bp, Lilium asiatic
  Clone ID: LIB3229-048-P1-K1-G8
cccacgcgtccggaagattgggacgtgctgctgaagatggaagaagaatatatcgagaacatctgtgtgcagatattgaagttcaaacctgacttggttataactgaaaaaggtcttagcgatcttgcatgccattacttcagcaaggctggagtgagtgctatcaggagggtgagaaagaccgacaacaaccgtattgcaaaggcttgtggtgcggtgattgtcaacaggccagaggaactgcaagagtctgatgttggaaccggggcagggctttttgaggtgaagaaatttgcggatgagtttttctcattcatcgttgactgcaaagatccaaaagcctgtactgtacttttaagaggtgctagtaaggatcttttgaatgaagttgaaagaaatttacagga

SEQ ID NO: 2645 - DNA, 398 bp, Lilium asiatic
  Clone ID: LIB3229-048-P1-K1-G9
gctgggcctaatactaatgggtctcagtttttcgtctgcactgctaagacggcttggctggatggtaagcatgttgtgtttgggcaggttgtggaggggttggatgtggtgaaggcgattgagaaggtggggtcgcagagcggcacgaccaagaagccggttgtgattgcggattgcggccagctttaagctgggttggatggggtggggctttctaagatctatattttgatgggaataatggtgtttgagggtgagcttgttgctgctggcggtctcttttatttactttaatggtaattgtctggtctgtttgtctgtgtgttgatcttggatctatggttgggtacttgttcgggtatttaaaaggagttttactctgaagttgctattatttt

SEQ ID NO: 2646 - DNA, 410 bp, Lilium asiatic
  Clone ID: LIB3229-048-P1-K1-H12
ctcacccaaagcttgaatcatgtctgggcggggtaaaggtgggaaggggctcggcaagggtggcgccaagcgccaccgcaaagtgctgagggacaacattcagggcatcaccaagccggcgatcaggcggctggcacggcgcggtggcgtgaagaggatcagcggcctcatctacgaggagactagaggagtgctgaagatatttttggagaatgtgatccgtgatgctgtcacctacacagagcatgcacgccggaagacagtgacggcgatggatgttgtgtatgctctcaagcgccagggacgcactctgtatgggttcggaggctgatcttcttctgcactgggatcgactgtgggggtatcgcttgttgttaggagtagatcttgttttctgctgagagcttttg

SEQ ID NO: 2647 - DNA, 411 bp, Lilium asiatic
  Clone ID: LIB3229-048-P1-K1-H4
gtctgttactgaagacatggacgaatctatgagcaccttgtggcctttgacttcgctcaatgggtcggatgcaaccttgatgggaattgaggaactcctggcttctgtgctaagaaagaagggaagtagtgaagggtcgttcagattggttaaggcagatgtgtcggcacgaacttatgtgaagatgggatttgttgtggagaagaagctcttgggcgaagaggtgaagttgtttgatttccctgagtggaagactaagccagagaaggtaagggcccactatgaagtattggcacgggttgaggagaatgggaaggtgatccctgagagaatagcagaggttcatcccttccaggttcaggaaagcttcgaggagagccttctaacgggtaatgtgtcaatgtcccatgt

SEQ ID NO: 2648 - DNA, 285 bp, Lilium asiatic
  Clone ID: LIB3229-048-P1-K1-H5
ccacgcgtccgagagagcgagaagcaagagaggaacccggcggattgagaaggagttgtgggaatacaatctttgttgttcctccaatgattctcatccccactctctagaggagaagcaccacaaagtctagtttgattttgagagttgtaatccgagtttcggaattgttagctacattttgtttgagattgtgagtgtagtttgttgttgttcttcattgtaagcttttcaagtggttagttgtttctaaatccgagaaccaaaggttgatttcattgtggt

SEQ ID NO: 2649 - DNA, 396 bp, Lilium asiatic
  Clone ID: LIB3229-048-P1-K1-H6
gccgccgcagccgaaaagtggtatctttgtggggataaacaaggggcacgtcgtcaccaagagggagctggcttctcgcccttcaagccggaaagggaaaactagcaaacgagtacattttgtgaagaacctcatcagggaggttgctgggtttgctccttacgagaagaggataactgagcttttgaaggttggaaaggacaaacgtgctctgaaggtggcaaagagaaaattgggtacacacaaaagggcgaagaagaagagagaggaaatggccaatgttctcagaaagatgaggtccgcgggagtgtctgagaaaaagaagtgataaatctcgatcagtatttcaaggccaagagtggttaggaccaagggtgtttcaagatttctagtatt

SEQ ID NO: 2650 - DNA, 400 bp, Lilium asiatic
  Clone ID: LIB3229-048-P1-K1-H9
gagatcctgaccaagatcgacaggcgatcgggtaaggagctggagaaggaacccaagtttctgaagaatggtgatgctggtatggtgaagatgattccgactaagccgatggtggttgaaaccttctctgagtatcctccactggggaggtttgctgtgagggacatgaggcagactgttgctgtcggtgtcatcaagagtgttgagaagaaggatcccactggagccaaggttaccaagtctgctgtgaagaagaaatgaatcgaagggatttctgcactggttttcggtttgcttgttgttggtggtcttgagtttgtgtcgttttggtgttgtgagtctgctgcttctgtgtcggggatctggttgcagaactgggttcttgatcgtcggtggcgtc

SEQ ID NO: 2651 - DNA, 397 bp, Lilium asiatic
  Clone ID: LIB3229-049-P1-K1-A1
gtccgcccacgcgtccgatcaatgcgtccaagaatgttcttgcaggggctgttgttcccgagttttcgtccccccaggctgggcaggtgaaggagtttctaagggatccaagcaggtttgctgctgctggaagtgcaccggttgctgcccaaagtgcatttgcacctgctgctgcagccaaggtggaagagaaggttgaggaacctgctgaggaatctgatgaagatatgggtcttggtttgttcgataaggctcttttgatttaacatggaagggtgaccttggaagttttggacttggattgctaggtttttattcggttaatgttcctgtttggtcgtttttttctcctggggcttcatgaaccctgcctggtttattgattaaccatttgggg

SEQ ID NO: 2652 - DNA, 56 bp, Lilium asiatic
  Clone ID: LIB3229-049-P1-K1-A10
ctcgtgtgtgcggaactgcatctacattagctcaaccaggtattggtgttgagaag

SEQ ID NO: 2653 - DNA, 369 bp, Lilium asiatic
  Clone ID: LIB3229-049-P1-K1-A12
gcgtatcttcacactgagatgctacgccaattgaatctcagctcatcaacgatgtccggccgcggcatgggtgggaaggggctccccaagggcggagcgaaacggcaccgcatggtcctccgcgtcaacatccatagcattaccaattccggccatacatcgccttgcccgacgtggcggtgtgaagcgcttcagcggcctcatatatgaggagacccgtggggtgctgaagatctttttggagaacgttattcgttacgccgtcacctacaccgggcacgccctgcggaagacggtcacgggcattgacctctttttcccactgaatcgccaggggcgcaccccctatggctttggcggcctatctat

SEQ ID NO: 2654 - DNA, 327 bp, Lilium asiatic
  Clone ID: LIB3229-049-P1-K1-A2
cccacgcgtccgagagagtgtaacagagacttggatgagcaatgtatacagctttggcatggttgtctgggagatgataactggtgaagcagcctactcttcctactctccagttcaagctgcagtcgggattgccgcctgtgggctgaggcccgagatagctaaagattgcccgcaggttctgaggtcgctaatgctgaggtgctggaacaactgcccggccaagcgacctcagttttctgacatcattgcgatcttgcaaagatacgacagcagatgagggtgaggtcctccctaactgtatgagttcgtgtttctccacaattt

SEQ ID NO: 2655 - DNA, 249 bp, Lilium asiatic
  Clone ID: LIB3229-049-P1-K1-A4
cccacgcgtccggagaggagtgtgtgtggtggccctcctatggatggggacggtgctgtggatgttgttgctgccgcttttcctttgtttttgtttcggtgttatcggcgcctagctaggattgtgggtgatgaagatgtattatctatgaaaggaggatgttgtaggtggtgtttttctctaagtggaaagatccatggatgtgtatgggatattatggttatttggtttaacaacaaaaatggtaat

SEQ ID NO: 2656 - DNA, 427 bp, Lilium asiatic
  Clone ID: LIB3229-049-P1-K1-A5
gtgacacagctggtcaagagaggtatcgagccattaccagcgcctattaccgtggcgcagtgggggcacttcttgtctatgacataacaaagagaaaaacatttgataatgtacagaggtggcttcgtgaactcagagaccatgcagattcaaacattgtcatcacgatgattggaaacaaggctgacttgaatcatcttagatcagtaccagacaccgatgctcaggttttagcagagagggagggtctctcatttctggagacctcggcattggactcactcaatgtcgagagggcgttccagaccactctgactgatattttccatatcataaacaagaaggcacttgctgcccaagaggcagcagccgcagctgggccccctatctccggaacgacaatcaatgttgcggattctggcaacta

SEQ ID NO: 2657 - DNA, 425 bp, Lilium asiatic
  Clone ID: LIB3229-049-P1-K1-A6
catctcccacctcagatcctcctccaattcaatctcagctcatcagcgatgtccggccgcggcaagggtgggaaggggctcggcaagggcggagcgaagcggcaccgcaaggtcctccgcgacaacatccagggcatcaccaagccggccatccgccgcctcgcccgccgcggcggtgtgaagcgcatcagcggcctcatatatgaggagacccgtggggtgctgaagatcttcttggagaacgtcatccgtgacgccgtcacctacaccgagcacgcccgccggaagacggtcacggccatggacgtcgtctacgcactgaagcgccaggggcgcaccctctatggcttcggcggctaatctatctatctatcttaaggatccgcggatgaagctagaaatcaaatcggtctcctcttatctta

SEQ ID NO: 2658 - DNA, 392 bp, Lilium asiatic
  unsure (1)..(392): unsure at all n locations
  Clone ID: LIB3229-049-P1-K1-A7
cccacgcgtccgatcaatgcgtacaagaatgttcttgcagtggctgttgctaccgagtattcgtacccacaggctgagcaggtgaaggagtatctcaaggatccaagcaagtttgctgctgctgtgagtgcaccggttgctgcccaaagtgcatctgcacctgctgctgcagccaaggtggaagagaaggttgaggaacctgctgaggaatctgatgaagatatgggtcttggtttgttcgattaggctctctagatttaacatggaagtgtgaccttggaagttttggacttggattgctaggtttttattcggataatgttctggtttggtctttcttctctcctgggacttcatgaaccatgctngctttattgattaatcatntgggt

SEQ ID NO: 2659 - DNA, 426 bp, Lilium asiatic
  Clone ID: LIB3229-049-P1-K1-A8
gtcttcttcgtggtcgcctctctcctcctagtcactgcaagggctttgtccctcaatgaggcaccaatggaagaggtttctctgataggcgtcgcacccgctcctgctcccttggctccagctccacatatggttatcaatgcaacaaaggagtgccctggtgtttgtttagcacggtgcagcaagcactcgcgacagaatgtgtgcaacagggcctgcacgacgtgctgtatggtgtgcaagtgcgttcccgcccgcactgccgggaacagggagacgtgtgggacctgctatactggctggaccacccaccagaaccgcaccaacaagtgcgcctgaagtcactctcttggatttacgctgtttaattgttcgtatttttaatttaaagattagtacggggtgtgttatcttgtgatatgtagt

SEQ ID NO: 2660 - DNA, 238 bp, Lilium asiatic
  Clone ID: LIB3229-049-P1-K1-B10
tatcgattgggtttttcgagaggatgagccgcgggttccgaccgggggccggcggctgcggctgaccggcgggatccggttgccgccggtggtctctgcgcccctcgccggagtctccggtggggatttttcactgatttttagtgctggctttgtgcttttgtttaatataaatatatgatatatgtgatctatgattattatcgtgtaatgataaggttttactgtagttcgtggc

SEQ ID NO: 2661 - DNA, 338 bp, Lilium asiatic
  Clone ID: LIB3229-049-P1-K1-B12
gtttacctgagattcgacagtgtggtgtccgcaactgattgtcagcgagctatgaataggaggcggtatggggggaaggctatatcggcaacgtttatgcggccccatgaatatgatgtgaaagctgcaagcgatgcttgaaatatgctcgagcagtaacttgaagttcgccaagggtgtgttgtgttcattggatctgaagtctttctaataccgtcactgatatatacttgtatgtttaggccatatatgttcactatattgctctctctgagattatacaatagcgtgttgtggcgtactcatgaatcaagaactaaaattatagaactagctcc

SEQ ID NO: 2662 - DNA, 137 bp, Lilium asiatic
  Clone ID: LIB3229-049-P1-K1-B2
tttttaaatcctaattccaacttgattaaacagtaatcacgagttttcaacaataggatattcattgaaagtagaaaaatagggctacacccaaattaagttccaacacgagataactttatactcaacaagatcaa

SEQ ID NO: 2663 - DNA, 309 bp, Lilium asiatic
  Clone ID: LIB3229-049-P1-K1-B5
tatcgattgggttttttgagaggatgagccgcgggttccgaccggtggccggcgggtgcggctgaccggcgggatccggttgccgtcggtggtctctgcgcccctcgccggagtctccggtggggatttttcactgatttttagtgctggctttgtgcttttgtttaatataaatatatgatatatgtgatctatgattattatcgtgtaatgataaggttttactgtagttcgtggcaaaaaaaaaaaaaaaaaaaaaaaggcggccggtctagatgatccaagcttacgttcgcgtgcgtgcgacgt

SEQ ID NO: 2664 - DNA, 434 bp, Lilium asiatic
  Clone ID: LIB3229-049-P1-K1-B6
gcgtctctctctctctcatggcgtcgccacctctgctgctcatcttctctgccgtcgccttgctcgtcgccgcctctccggccgcctccaccaactccgaaggcgaagctctgcacacgctgagaacccggctctccgatccaacaaacgtcctgcagagctgggatccgacgctcgtcaacccctgcacgtggttccacgtcacctgcgacgatcacaaccatgttgtccgcctggatttaggcaattccaacatctccggccctctcggcccggagctcggccgcctccagcatctccagtacttggagctataccggaacaactttgatgggaagattcccgaggagctgggcaatctcaagagcctcattagcatggacctctatggcaaccgcttccatggcgagatcccgaagtcgcttgctaagctc

SEQ ID NO: 2665 - DNA, 249 bp, Lilium asiatic
  Clone ID: LIB3229-049-P1-K1-B7
ttttggaatcctaattccaacttgattaaacagtaatcacgagttttcaacaataggatattcattgaaagtagaaaaatagggctacacccaaattaagttccaacacgagataactttatgcctaacaagatcaatttccaaaatgaagccttagccagagatgtcgattgatttgacctgcggcttcttggcctcctgcttggggactgtgacaaaggggacgcccgttttcattggcgactttac

SEQ ID NO: 2666 - DNA, 366 bp, Lilium asiatic
  Clone ID: LIB3229-049-P1-K1-B8
gagatctgacgctcctccaatcctcaccgcaatctcgatcgatccggatttcagctccgatccatgaattcaaggagggactatcggaacaatagagctgaactttttgatggcattgaagaaggtggaatcagagcctcctattcgactagtgaaatagatgagcttgacaatgatcatgctgttgatgggctgcaagatagggtgaatatccttaagagattgacaggtgacatacatgaagaggttgagactcataatcgtgtactggatagaatgggcagtgaaatggacgcatcaagaggaattcttacaggaacaatggatcggttcaagacggtgtttgagactaaatcgaatcgcaga

SEQ ID NO: 2667 - DNA, 323 bp, Lilium asiatic
  Clone ID: LIB3229-049-P1-K1-C10
gctccatgccgttctgagcgattggctaagtacaaccagctcctcaggatcgaggaagagcttggtgctagtgcagtctatgcaggtgccaagttcagggcaccggttgagccttactagaggaagtagatgactgctggagcccttcattttgttggaagggagttttactttgagtagtagtataataatgagataattttgcagtgttggtccatgttttggactgggtaatgcatctctaatccgagtgtaaaagtttgaatgtgatttcagagtttggttgccatatatttatctaccggttcagtgtttggtagtgt

SEQ ID NO: 2668 - DNA, 386 bp, Lilium asiatic
  Clone ID: LIB3229-049-P1-K1-C12
gttcaaagggagatgcacgttcaatatgccctagtggatcttgtagagccattgaagttcctcaggttgctgattgtctacaaccagtagttaatataattccactacagttgttggcatatcatctcacagtcttaagaggatatgatgtggaccaacctagaaatctcgcaaagagtgtgacaacacaatgaagtatcatctcacagtcttaagaggatatgatgtggaccaacctagaaatctcacaaagagtgtgacaacacaatgaaatggaacgtcagcctaatcctttatatccatggcgaagccattaaccatagtgtagcaaagtctaacttttaggaatcattttttctagcttattactaccgatttaattattt

SEQ ID NO: 2669 - DNA, 426 bp, Lilium asiatic
  Clone ID: LIB3229-049-P1-K1-C2
cccacgcgtccgcttatcccggaactaggtttttaattcgtttgatctaattccctgttttctcttgtggaattagggtttcccgcccggctctcttctgagcttcgattccccgccccgcccagcgctcgacggaatatacttcatccttggtttgtaaggacataactgagttcgttttgggaaacttgagagaatgtcgaccccatatccaatgcttgacaacaagcccattgatcaatggaaggtgaccgagttgaaagaggagctccggaaacggaaaatgcccataagaggtcttaaggaggagctggtcaaacgactgtttgatgccattgaaatggagaagggacccgtcaatgacgcagagacggaaaatggcttcgatgttgattctaatcctcaggatactgccgagcagggtga

SEQ ID NO: 2670 - DNA, 424 bp, Lilium asiatic
  Clone ID: LIB3229-049-P1-K1-C4
cccacgcgttcgcccacgcgtccggtaaacttcgcacactggagatggaatttgagatggagaatcctcaaaagaataagaatttggcctttaaaagtatttcttcctctcataactctagggatatgttgaattatgatatatgatataatgatcaatctctagacctagatcttgaaattgctcgtataagtaaagaatttagaaaactcttaaaaatgaatcacgaaagagactaaatatctaggtcaatcttctaatcaaaaggataatcctcatgatcatgctaaacaagagtttagagctaataaaaatcccactgatatatcaaaagttcaatgttatacgtgtaaggagtatggccactttgctcatagttgtaccgctaggaaagcttctaagagacccactgaaaagaaaaatg

SEQ ID NO: 2671 - DNA, 427 bp, Lilium asiatic
  Clone ID: LIB3229-049-P1-K1-C5
agttcatgtaataactcttttatctcccaacccattgcttcttttggtccatattcttctcttggctgcaatgcaagaggaattatgctgtcaggtttggtcaatacactggtcgatcgagcagaagatgaaagatatcactgacttaatatcggacaagatcttgagaaatatctggaagatgtggattcggtctttcaagaacgaaccctaggaattaaaatcaatcaggggaagcggaaggaagatgtttctcataatgaaagagggaaatattgttttgaacaattttgagctcgggtaggacctgctaatatggctctcatggatgtacactaatttataagcgacacaagggttggataagattgatcacgatcagagacattccagcctgaactggagggagtggaccttgggggtcttt

SEQ ID NO: 2672 - DNA, 173 bp, Lilium asiatic
  Clone ID: LIB3229-049-P1-K1-C8
cccacgcgtccgcttatcccggaactaggtttttaattcgtttgatctaattccctgttttctcttgtggaattagggtttcccgcccggctctcttctgagcttcgattccccgccccgcccagcgctcgacggaatatacttcatccttggtttgtaaggacctaactgag

SEQ ID NO: 2673 - DNA, 429 bp, Lilium asiatic
  unsure (1)..(429): unsure at all n locations
  Clone ID: LIB3229-049-P1-K1-D1
gacagccaaggtttaacacatggtggcgcggggacgaagcttggagccgaaggaccttggagatgaaggatactggtgtgaagatgaaacaaggtagcgtgattctgaagttactgatcctatataaggttgaagctgaagatcatcaaggctagccgggatttgctcctcatctgagggcaagtgaaggaggagagtctgggagttgggtgtgatatccgggaggagttatgggagtcaggaatttgttgatgaagctatgatgaagatctctatgaagctattgaagagcttttgatgctgattttgatgaagacctcgtgagtctgtatactctatgaagctggaatcttatacttctctctcggttcagcaacccaacagtgagtcttatacttnctcttctgagatgatgtattgaatgtgtga

SEQ ID NO: 2674 - DNA, 274 bp, Lilium asiatic
  Clone ID: LIB3229-049-P1-K1-D10
cccacgcgtccggccacacatccggtgcatccggtgcagacgatctagacgatccaaggctaccttcccgcgcatgcgacgtcatatagcgtctattgagatacctaaactgagacgactggcacaacgtctacaacgtcaagaccgggaaagcaccgaacttactcaacttgatcgacatgcagcacatgccagttggggcagctgccgtaatagcggagaggatcgcaccgatcgacatttgcaacagctgcacagcctgtgtgacgcacgc

SEQ ID NO: 2675 - DNA, 196 bp, Lilium asiatic
  Clone ID: LIB3229-049-P1-K1-D11
cccacgcgtccgatgaagaaggctgcagaggctgagaaggaagagaagaagtaacctgttcgttgctttaatttgtggtgatttgtccaagtaaaccccctcaggagtaattttggttctgttggtctttctgtcgtacctttctattataatactatgaattttgaggatgcagttttatgagtgtttctatttc

SEQ ID NO: 2676 - DNA, 427 bp, Lilium asiatic
  Clone ID: LIB3229-049-P1-K1-D12
ccttcaaccatcgtacctgaagaaaataatgagaatcgcatgcttcaagagacttctgatgtatctccagttggagtacggaaaaggaaggcacctctaaatgcaaaaagcaagaaaaaatctacttcaaacaggcagtctaattctagaagacaaagtcttgcagatgctggtttaacatggaaatcaggtgttaggcgaagcacccggatcaagacaagaccattgcagcattggtgtggagagaaagtgttatatgggcgagtacataacagcatgataacagtaattgggatgaggtacgcggagagggaagtggatggcaaatcaccggtgctgaaggtgaagtcgtatgtttctgatcaatatgctgatctggtgtctaaagtagccaagtagcagtttcactgtgtaccctctacttgca

SEQ ID NO: 2677 - DNA, 424 bp, Lilium asiatic
  Clone ID: LIB3229-049-P1-K1-D2
ggcgaaggcgaactctcggcaaagatgcagatcttcgtgaaaaccctaacggggaagacgatcactctcgaggtcgagagcagcgacaccatcgacaacgttaagaccaagatccaggacaaggaagggatcccgccggaccagcagcgcctgatcttcgccggcaagcagctcgaggatggccgaaccctagcagattacaacatccagaaagagtcgacattgcatctggtgctgaggttgaggggagggatcatcgagccctcgttgatggcgcttgcgaggaagtacaatcaggagaagatgatttgcaagaagtgctatgccaggcttcatcccagggcagtgaactgccgtaagaagaagtgtggccacagcaaccagttgaggccaaagaaaaagattaagtagatgtctaagttga

SEQ ID NO: 2678 - DNA, 430 bp, Lilium asiatic
  unsure (1)..(430): unsure at all n locations
  Clone ID: LIB3229-049-P1-K1-D3
tctcctcaaagccctagttttcaacctaactggaatggagaccggatccaaggccaagaagggcgccggaggccgcaagggcagcggctcaagggcgaagtcggtgactcgctcagtcaaggcggggctccagttccccgtcggaaggatcggccgctacctcaagaagggccgctatgcccagcgcgtcggatctggagctccggtctacctcgctgccgtgctggagtatctcgctgctgaggttttggaattggctggaaatgcagcccgggacaacaagaagaaccggattgttcctcgacatgtgtgtctggcggtgaggaatgatgaggagcttgggaggttgttgggtggngttactattgctcatggtggagttttacccagcatcaaccctgtccttctgccgaagaagactgggaaggag

SEQ ID NO: 2679 - DNA, 429 bp, Lilium asiatic
  Clone ID: LIB3229-049-P1-K1-D4
atcaacattatcagtgcctgtttccatctacattttatcactgccattgccgtacatccctgaagctgtaaatttgagcacaaattttgtcatcggtactgcgattctcgttttcggactgctattgtacaatattccgaaatctactagccagttccccaaaaatgattgacttgatggcttgtgtaaatcaagaaattgtcgctcgggaagaattgggggtttcttgtttattttgtgtatgagttttccaagcctcgagaatccggtgcttcattttcttcgacggggtacaattttgtttgcaaaggattaataagttcgagagagtgaattgtttgggaagggtattctactgttcaacaaatcattgtggaatgtagatgagttgtaggaattatgcaaacatatcccggacaatgttagatt

SEQ ID NO: 2680 - DNA, 430 bp, Lilium asiatic
  Clone ID: LIB3229-049-P1-K1-D6
cccacgcgtccgaagaaggtgcagatctttgtatcaagcattacagtgcagctgcctggttgcaccgctctgaagctcaatggcaagaaatgttgggacaagaatagttcagaagactccgcagcactggcaatgttgtacgagctccaaagacaaggcaggtgcaaattgaaggaagttgaacgacggccgtgaatggaatctgaacatcacatccgccaacttcagccttttccgattaagttttaatgataatccatgtttttatagtggtaaaatatattttccaatctgatccgatgcagcacaactttcatacatgatctaggagtttcagagtgacatgaaccatgtagatttaacagggacctccatggagacagtcctaacccatagttgtctcggttttattggctgaattgttccggag

SEQ ID NO: 2681 - DNA, 423 bp, Lilium asiatic
  Clone ID: LIB3229-049-P1-K1-D9
aattgaatgcagatatttgacataaatggagatttgttaagctcatatatgttaggctgatgtctttttgaattttttttatattactaagattgttggtcattatatgagctatttacttgattaaatctatgtaccatgtcccaaatggttaaacttgagttgcgattcggttaacaccgatggttaaatttgagttgcaatttcattaacaccgacacttcacgtccctggttccagtaatttgagttagacatgatatcaggcctgaatccattgtaagtaagccacagacaaagggaatcataaattgtccacacaccagcctggatatcaaaagcattgttatggcactttgaccgtctggctgtcttttttcgactgcacataccattatttaacatctttcgatcctctccggta

SEQ ID NO: 2682 - DNA, 431 bp, Lilium asiatic
  Clone ID: LIB3229-049-P1-K1-E1
tgcaaatgaagatcggtttcggctttgggttggtctgccagattgcgaacttttattgccatattttgttgaggaatctgagaagccctagcgggaatggcggatatcaaatccctcgcgggttcttgtttaacatagtgacgtgtgcgaactacatgacggagatttaccagtggcttggcttcaatattgccacacagacggtagcaggttatgtgttccttgcggtggcagctggcattatgaccaactgggcattggcgaagcaccgccgcttgaagaagttgtttgatggaaaagaaggacgaccgaaatatcctcgacgatgggtgatatttcctccattcctctgaggcatggtggcttttaggcttgatttctctttgattgtacttgaattgtactgcaatttagctctacatttttaattg

SEQ ID NO: 2683 - DNA, 418 bp, Lilium asiatic
  Clone ID: LIB3229-049-P1-K1-E2
gcgccgacaacaccggggcgaagaacctgtacatcatctcggtgaaggggatcaagggccggctcaatcgcctcccttcggcttgcgttggggacatggtgatggcgactgtgaagaagggaaagccggatctgcgtaagaaggttatgccggctgtcatcgtgaggcagcgcaagccgtggcgccgaaaggacggtgtctacatgtactttgaagataatgctggagtgattgtgaatccaaagggtgaaatgaaaggttctgccatcactgggcccattggaaaagagtgtgctgatctatggcctcgaattgcaagtgctgcaaatgctattgtctgatgctctaactcctgttctgatgaattgagtttctcgtgtgttgttagtattttatgcaagacttaaatctgaatttg

SEQ ID NO: 2684 - DNA, 350 bp, Lilium asiatic
  Clone ID: LIB3229-049-P1-K1-E3
gggcatggaagaaggggagttctcagaggccagagaggatcttgctgcccttgaaaaggactatgaagaagtcggagctgagggtgttgaagatgatggggatgagcctgaagactactgagttctggtcttgggcgttcataattgcttttatgatattctgtatgttggattatttgtgtgtgcatcaccagtattggcttgatcttgtatggttattatgtcaagggtggttggcttgatcttgtatggttattatgtcatgtttgaatttgatattctctttcattgtttagatgtatttacttttattgcagtggataatttgaaatttgattttagtttgtgaa

SEQ ID NO: 2685 - DNA, 404 bp, Lilium asiatic
  Clone ID: LIB3229-049-P1-K1-E5
gacggagtggactaacggccgagctgatggaagatgacggaatccgtcagaattgacggcgctggctgacggtgacggcgttaggagttgacggcttcggatgacgtagcagacgaccgttaactaacggtcactgacggaaaccgtcagttgacggttagtcaacgttgacggttgactggaccgggtgacgtggccttcgggtgacgtggcgtgccacgtcagcgttgggcgctgacgtagctggtgactggatgctgacgtggaagggccacgtcatcgttgggcgccgacgtggctgccgacgtggatgggccacgtcggcactggaggtgacgtggccgccgacgtggaccgatgacgtatgatgccacatcagccctagggctgacatggctggtgac

SEQ ID NO: 2686 - DNA, 313 bp, Lilium asiatic
  Clone ID: LIB3229-049-P1-K1-E6
ggaaaagccactggcgaggcatttgtggagttcccatcgcctgaggcggcgaagaaggcgatgcgcatggataagaagatgattgggtcgaggtatgtggagctgttcccagcaacccgtgaggaagctgggatgtagtgcaataggatagcttggttgagtattttgtggttcatttgcttacagtggataagtagtgtctttgtgagggaggattcatcgaatccactgtagcagtggtaatgttgaattcatatgttttatggtttctggatctgcttttttattctgtaactaatgactgcattaggat

SEQ ID NO: 2687 - DNA, 282 bp, Lilium asiatic
  Clone ID: LIB3229-049-P1-K1-E7
acgaggatgtggcttgtggaagtgagattcgcagtgttgttttggctggacgccgcttttatgaaaaggaaggcctccctgcattcccaatgggcaaaattgatcagacaagaatgtggaaagttggcgagagagtccgtgcgaaccggcctgaaggagatttggggccgctgcatccatttactgctggtgtttttgtggcattaatgatggctcagatcgaggtcctaaggaagaagggtcattcctactcggagatcatcaacgagagtgtgattgagt

SEQ ID NO: 2688 - DNA, 426 bp, Lilium asiatic
  Clone ID: LIB3229-049-P1-K1-E8
gaatccctgcccatcaatcctcaatcttctactactaagattcttgagccctctaataactcttatccaaaagggcgagaaacaatccccaaaccgaaaggccattcagctttagattactcgcgttgggacagtgttgaagatggatcgagcgaagacgacgacgatgaggaagaggagcaacaaccgcagtatcgtttccgtgtcagaactgttggcgtgcgacctgtgaagtgaactgttggcgtgcgacctgtgaagtgaatacacgtacaaaatcatccgttaaaatctgatggaagatacaactagttagctcgttgccatactcctagttgtaggagcacaggagtgaattgttgtgaaatttcatgtgaatatttagttatagtggaagggctagggtttcagaggctttgtcggaat

SEQ ID NO: 2689 - DNA, 339 bp, Lilium asiatic
  Clone ID: LIB3229-049-P1-K1-F1
tttaccagaaaccaaacagataattaacagaataagaaaattttcataacattttttttgctgcaacttgcacaatgtacatgtgcaggttacaacacaaaccaaagaacgacaatgctaccactaaacaagaccagcagacctaaactctcacaaccagaactaagaaaaccatacccatccaccaccgagacatacaaagaactcatcaaacagccacatcttcagccgctgccttagccttcggaggccggcccctccccttcttcgccccagaggaggccggagtgcccaccgccttagcggaggcgggcgcatcagcagccccatcggtcttcg

SEQ ID NO: 2690 - DNA, 424 bp, Lilium asiatic
  Clone ID: LIB3229-049-P1-K1-F11
ctcagaatcagttgacattgtggaagtacccttctatggttaagactgcagagcttatggggcacacttctcgtgttctattcatggcacagagcccggatggatgcacggtggcatcggctgcaggggatgaaactctgagattctggaatgtgtttgggacgcctgaggtgcagaagccagcagccaaggcgacagcaaggtcggggccatttagcaaccatagccatgttagtattcgttgagtttgtgatgtttggcgaggtcggaattaatacttgattgcgacaaagtttgcatactgagtggctgtggtgatttgaaagattgaaactcaattttggtgaaatggaaaattactcgattccatttgttttgaagaaaaaaagagtactctggataacttgaagtaactattcttttg

SEQ ID NO: 2691 - DNA, 351 bp, Lilium asiatic
  Clone ID: LIB3229-049-P1-K1-F12
gtatttcaggggcggagccacgcgttcgggcccttttttttttttttgaacaaaataactgaattaaaccgtaacctcaatacagaggactttcaaagcagggtacagattaacctacactaatccatacactaataaatgatacattgcgagcggcctaaataaacacggggggaggaggttaaatgcctccctagtccttggacaaagacaactttttaatatgagcaactattactgtctgtgcctgaagtgaaaaaggatctagcaaaatgctcaaaaagtaggcccgcttagcaaaaatatggtacatgggaatcctgttggttgatgaaacaaatacccccctta

SEQ ID NO: 2692 - DNA, 422 bp, Lilium asiatic
  Clone ID: LIB3229-049-P1-K1-F2
ccaaatggccggtcgtggaaagtctctcggcggcgcagccgccgtcgcagcggcgaagaagagtcattccaggagcagcaaggcggggctccagttcccagtgggccgcatcgcgcgcttcctcaaggccggcaagtacgcggatcgggtgggcgccggggctccggtgtacctggcggcggtcctggagtacctcgccgctgaggtgctggagctggcggggaatgcggcgcgggacaacaagaagactcggatcgtgccgaggcatgtgcagctggctgttcggaatgatgaagagctgatgaagctgttggggaaagtaaccattgctagcggtggcgtcctccccaatatcaacaatctactgctgccgaagaagtctgccaaggctgcttgggtcgctgatgatcatgaaatttgag

SEQ ID NO: 2693 - DNA, 421 bp, Lilium asiatic
  unsure (1)..(421): unsure at all n locations
  Clone ID: LIB3229-049-P1-K1-F3
gccttttggcttatttttagcaacagacgcggaccttcctggccaagcattggctgaagaaattgcacgccgtgttggtaaagaaagatgctggagagttagttggccaaaaaattgcaaagatgcaaacgaggtgctcatgtttttcggacgagatacactgaaggaagttatagagaatgctgagctatatcccatacggngacttctcaagttcagtgatttcttccctgagattgatgcttattatcacagctgtcatggctatgatcttggtgtttctacaggctggacagctttagatgcattttatagggttatccctggagaacttaccataatatcaggagttcctaattctggncaaagcgagtggattgatgccctgttatgcaacctaaatgcaagtgaaggatggaaa

SEQ ID NO: 2694 - DNA, 347 bp, Lilium asiatic
  Clone ID: LIB3229-049-P1-K1-F5
cccacgcgtccgctagctctagatctagagctagctctctagaggacgctagattacatacacgcgcacgcgcgcgcgcatgccttgtattgggtcacctatagtgaatccactggccgatgcactacaacgtggtgtacggcgaaaccactgcgttacccatgttaatccccatgttaaacatcctgctttagacagctgtcgtgatagctgacaggctcgcaccgagggccgttccgatcagttgtgcaaacagtatggcgaacgggacgcgccctgtaacgcggcatgaagcgcggcatgtatcgcggctactctcatcgttaccggcacagtggccagtgcac

SEQ ID NO: 2695 - DNA, 416 bp, Lilium asiatic
  Clone ID: LIB3229-049-P1-K1-F6
gaacaaaataactgaataaaaccttaatctcaatacaaagaacttccaaagcaagttacagcttaacctacatcaatccataatctaataaatgatacattgcgatcagtctaattaaacacggtgtaagctgctaaaattcctccctagcctctgaacaaagccaacttttaaatttgatcaactattactgtcggtgcctgaagtgaagaaggatctgtcaaattgctcaaaaagatggccttctgagcaaagagatggtacatgtcaatcttcttgtatgattcaacaactacccccttctgtttccgtctccgcctcccacggctgccaccgccctggatcaatccaccacctgctctgttcacagccagattttgggtgccaccatcaccacgccctcttttgaagggggg

SEQ ID NO: 2696 - DNA, 423 bp, Lilium asiatic
  Clone ID: LIB3229-049-P1-K1-F9
gggatgttctctcgagtggaaattcagtgcaagaggtcgctcacattacaaatggttcacatccagggaattgtatctcactccttcgggctctgaattccagccagaacaacatgttaattcttcaggaaagctgcaccgatgcgtcaggctcgatggtggtctatgctccggttgaccttccgtccatcaacattgtgatgagcggcgaagatccatcttacatacccctgcttccgtcagggttcaccatatcgcctgatggacagccaggtggaggtgcaggcccctcatcgagctcgaatccgatgggaggttcgaatggctcgttgataacggtggcattccagatcctcgtaagcagtttgccttcagcaagactgaatctcgagtcggtgacgactgtcaataacctcattagca

SEQ ID NO: 2697 - DNA, 426 bp, Lilium asiatic
  Clone ID: LIB3229-049-P1-K1-G1
gtacgacggtggtcctttgtcctaccccaccgaaggctgtagcaatggtaaaaatgggatttggtgccgaccaccctccaaaggatttcttgaaacagttccttaactgcaattggtttaaggacagtgccgatttcatcaatctaactttgaaagctttaagtgaggagccttctccagtaccagaagaccttaggcacgacctatcctgggaggcagctacagaaagatgggtgtctattgccgagctaaaccaatatgtttctgaaataactccgacctcaaaatcatcgaagtctcgtaaaaggagcctggagggagcatcagcatccttgcatcaaactgtttctggtatcgagatcgcaagacgtgcatttggtgccatcccgaaaagtttgtatgctgatgaacaacaatgcaaggagc

SEQ ID NO: 2698 - DNA, 417 bp, Lilium asiatic
  unsure (1)..(417): unsure at all n locations
  Clone ID: LIB3229-049-P1-K1-G11
ttgatttcaggatttgaacaatgattattgatctggagctattggaggtctgaagcatgatgcagagcagagagagagagttcgaagcatacgaagaagaagagttgattctttatagcgccgatttacttggtgatcaaggatagtatgtgctggagtggactctgatggtgacatgtcgtgatgatcaagtcccttggagttaaatgaattcaacttgaatacgacgcaatctcttcctataaataaaagatgtagaagcacaatcgagagaggttggggactggatcctccctgcgagttgaagtccagagttagagagaagcatggagtcttgtctctcattccgagagcaagttangtgagtagagagacttaatctcttcatagatcaagtgttgggagttgatatttcat

SEQ ID NO: 2699 - DNA, 432 bp, Lilium asiatic
  Clone ID: LIB3229-049-P1-K1-G12
tattactccgacagttgaggttccaggcccttccaaagattcaagagagagttcaatgcctggggattctggtccagatcttgagaagagaatccgtgctctaaaaaagaagattcggctcgcagatgcgcaagtcaaaggtgaccaacaacatacgaaggcggagcagacggagaagatggcaagagtggatgggtggcgtgaggagctgaaacttttggaagacggaaaggcgaagatgctctcttgattctttgcatcaattctctctcggtcacactcagattgtgatgtgataatttaatgtcgaagtttaatccaatgcaggtagcatgtgtatgcacctattaacatgcaggtcttatggttagtctaagttatgatgcacgattagaacctgaaatgttaattttagcttaggtattgatgcac

SEQ ID NO: 2700 - DNA, 414 bp, Lilium asiatic
  unsure (1)..(414): unsure at all n locations
  Clone ID: LIB3229-049-P1-K1-G2
ttcgaggatgacactacagaggtttgggaatacctcaagcagtagcatttggtatgagctagcatatttggaggcaaagggccgggttaaaagaggggatcgggtctggcagctggctttcggatccgggtttaagtgtaacagtgcggtttggcgctcgatgggccgggttcggaggcccagtaggaacccgtggctcgattgcctcgaccgctacccggccccactctgaagtgtcagctgagaaggaacgacacgaaggaatattgatgagggcgccacanaaattattataaaatactatatgtattttgatataattntgcggcgccttttgcaatactcatacctggttaggctctgatatggttactttcctttgctcaatgtgtggtttattaatagactattcta

SEQ ID NO: 2701 - DNA, 374 bp, Lilium asiatic
  Clone ID: LIB3229-049-P1-K1-G3
gctggaccgacgcgtccgaatttttattgtgcttttcagaaaagccacgtgtgatgccgtccatatgaggagaggatcccacctataagaagagacaaggagtccagtgaaagacatctctcaaaattttccaagggtacaaagagacgccaagcaatgaggtgttgggtttcattcgaaaatcaatattgagttgtgaagattgttgaatcaattcttgaagaattactggatgctctgaagatcttatgaagttattttgagttttaagaccatctgtccatgtaagttcaattcctctttatgaacacaatgtattcgatgaaatgcatcaatgaatttagcttcgggaattcgatgttttaagtgatatt

SEQ ID NO: 2702 - DNA, 430 bp, Lilium asiatic
  Clone ID: LIB3229-049-P1-K1-G4
cggacgcgtgggcggacgcgtgggcggacgcgtgggttctgagagcatcagtaacagcaggcttggaacaagatctatcgactgtcttgtcgagggacagacaagtatatcgcatcctggagggtgtcctagaagatatattggaagaagaagttggtgcctgtgattttactgactttgttactgaggctgctaccggagatgaggatcttctagatgagggctcccaaaggaaaaagctgaaggcaatgcctttacccaggcctaagaaaattttaaaaaggaagaacagtgaagttggatgtctgtaatctgatgtaattctgaatttcgaggataatgttggaatttcgtgagcttgatttattgtgtgtttggtgaaccatgtctctattgttgtaagtggatttggcgaaagtaggcaatgctt

SEQ ID NO: 2703 - DNA, 429 bp, Lilium asiatic
  Clone ID: LIB3229-049-P1-K1-G5
caatggtggcctatgagaagggtctgacaacatgggcaaagtggatcgacttgaatttggaccctcgtcaaactcgagttatcttcagaagcatctcagccaagcacaacaaggcgaaagggtggcaatgctacaagcagagggagcctctggttcttgcacaatacacttctccccgcgagcccggacagctagtggtgcttcgggaggttctgaagaaaatgagcttccctgtataccttctggatgtgacgagaatgtcgacccttcggagggatgggcatccatcgatctactgtcggtcttccattgtccgtcggagaacagatggcaaagccctcaactcagattgcagtcattggtgtctccctggtgttcctgatgcctggaatgagatgctgtattccctatttccactaaaacatacac

SEQ ID NO: 2704 - DNA, 426 bp, Lilium asiatic
  Clone ID: LIB3229-049-P1-K1-G7
cccacgcgtccggcatgatggcttttaataccaactatagagacactggactctttggtgtttatgcagttgccaagtcggattgcttggatgatttggcatatgcaatcatgtatgagataagtaagctgtcctaccgggtttcagaagctgatgtcactcgtgctcgaaatcagctaaaatcttctcttcaactccacattgatggtactagccctgtagctgaagatattggccgtcagctccttacatacggcagaagaatcccagttgctgagctttttgctaggatagatgcagttgatgcaagtactgtcaagcgtgttgcgaaccgattcatctttgaccaggatattgcaattgctgctatgggcccaatccagaagctaccagactacaactggtttagacgccgcacttatttac

SEQ ID NO: 2705 - DNA, 424 bp, Lilium asiatic
  Clone ID: LIB3229-049-P1-K1-G8
acgatcccctccaattgctctgagattcgtcgatcatggccgatgacgcgaacagatcggccttcgtggagctccagggccgtatgattgagaccaccggcaagttgaagcaggtacaaaatcagatgcgtggtaaggagggagaaaagaaacgtgcttacctaacacttgaagagctccgacaattaccagatgatacaaatacatacaagtccataggcaaagtgtttgttcttgagccgaagtctattttggtgaacgaacaagagcagaagctgaaggacagcgacagtgcgataacctcattgcagacctccaaagaatacttggaaaaacagttggcagagacggagaacaacatccgagaactgctgcagcaagatccgggtctagcgcgccagataatgtctatgactgtgatgta

SEQ ID NO: 2706 - DNA, 357 bp, Lilium asiatic
  Clone ID: LIB3229-049-P1-K1-H1
cttccactgaggagctaatatccctgccaccgacccaaggttaccatatttgtatcggatttggctatgttgcttctacaaaggagttcaaggtggtcagattctttattcattgtggtgggttcagtcattatatggaggattgttgctgtgaggtattcatattgggggctagtgagtggagagaagccaggaatccacctccattacgttaccaatttgagtcgggtgcacctttcctccaaggggggatacatcttctgcgaaacttgaatatcggtgatcaacgtgattgtatatatgtatttgatattgataatgaacaatacaagactattccattcccagatttctatc

SEQ ID NO: 2707 - DNA, 239 bp, Lilium asiatic
  Clone ID: LIB3229-049-P1-K1-H11
cgtccggtcctggttgaggcgacgatctgggcaatgaatttaccataggccgatggccccatgaatgtttcagcatatgacacaacaggtacgggcgcaatgcccgaatgttgaatatgaacgggaggggtttcaatgcctgctttattggcatgggaatggcagaacggagggggggtggtttttattggggacggcaaacctttatttgacggaaaaccagacaattggaagtgaag

SEQ ID NO: 2708 - DNA, 420 bp, Lilium asiatic
  Clone ID: LIB3229-049-P1-K1-H12
attgaatctgaccatgaaaatgatcccaaaaagtacgaaaaaacaagagcgacactgcttattccaaagtttctatagacaagaccacagttataggcatcacggaagtggaagtagttgctatgaagagacttgagaaaggcgatgaatcagttgctgaccgacacgaaaattcggacatcatatttagtcaagatctgatcgttagagatactcgaacgcctgctcctgttcgttcagccctgaaaaatgtggtcaacttcaaatgcttcaaaaagcgagagacagagtctgggaatagcttcacgagtcttatcccgttttcgaaagatacttacagagaatctgatggcggaaacaatgaagcagcacagtacataaaagaagagaagaaacgaaaacagttggaagctattgcag

SEQ ID NO: 2709 - DNA, 427 bp, Lilium asiatic
  Clone ID: LIB3229-049-P1-K1-H2
tctgggtgaagcagtgggaactcatagccggggtctttgtcaagaacgcatatcttcacttccagtgtccaaatacaaatgtagttttttttcaaggacaaaagcacgacgggaaaggtgcgtgatttgtcagatggactataaaagaggagaccggcaaatgactcttccgtgcaagcatgtctaccattctgggtgtgtgactagatggcttagcataaacaaggcatgcccagtttgctctgtagaagtctctggcgaggaacctaggcgtcaaagcctctgattttcggttcatttcactgttagttgcacacgtcatgaaataggttgtttcaacgcagcctaacgagttttagtcttgattttttttccttaccttcctgttgtagtagaagtgttctagttgtagaacaagttacacaca

SEQ ID NO: 2710 - DNA, 425 bp, Lilium asiatic
  Clone ID: LIB3229-049-P1-K1-H3
agagtcgcgtgtagcgcacttgccaacgacaggctgtgagaggagtactacagtcttagaatgatgaaagtcggaaggttgaatttttgggtcaccccgaatgcacttgttgcctctcggaactttgtggcttttgatgacagttcttatgtagtggtatcggagtctgaccttaatggctatgatggtgaccatggaacaacaggttatgttggaagctgcttatgggcagagctgagtctggcgtacagggtgcaatatgctgggcaagcagctcttgcgaggctctcactctttgtgcttggttgccatgctaaacaggaggcggtgttacccgacaacaagctggtaagggagggcttctcgtttgaggccgataggctgggacacaggcatccgagtctgttgagagaggtcgaggtaac

SEQ ID NO: 2711 - DNA, 430 bp, Lilium asiatic
  Clone ID: LIB3229-049-P1-K1-H4
attaaggccctgaaacataagttaacccgcatatcacggattgctataaaaagaatgggagaactagacgagaagccattccttaaggcctgtgaggaaagattctcagaggaggatgctgagatgaaagcttatacttattattctcagtggcaggaagagcttaggaacccagattggcatccttttaaagttattatggttgatggaaaagagaaggaagttttgcgagaggacgacgagaagctacaatctctgaagaatgagctgggccttggtgtctacaaggctgtaaccacggccttactagagatgaatgaatataaccccagcggcagatatgttgtaccagaactctggaatactaaagagggacggaaagccacttttaaagaggttgtccagtacattttgatgcttgttccaggga

SEQ ID NO: 2712 - DNA, 438 bp, Lilium asiatic
  Clone ID: LIB3229-049-P1-K1-H5
gcccgctcctggtaagaggcgatgcaactgcaaaaatgaagtctaccataggcaaattgccccaggaatgtttcagcagatgacagaacaggtctgtgagcaatggcaaaatgttaaatatgagcgtgaagggtattcaataactgttgatattgagaagggaatgcaagatggagaggaggttgtattttatgaggacggcgaacctataattgacggagaaccaggagatttgaagttcaagattctaaccgcaccacatgatcgctttaaaagagaaggcaatgacttgcatacaacagtaaatatttcactgcttcaagctcttgttggctttgagaagagcatcaagcaccttgatgaacatttagtcgatatcagcacaaagggtattactaagcctaaagaagtgaggaggttcaaaggcgaaggaatgcc

SEQ ID NO: 2713 - DNA, 328 bp, Lilium asiatic
  Clone ID: LIB3229-049-P1-K1-H6
gttgaagccgtgattgactgacacagatctggagctcctgcattaccatgggcccgacgacatatttactgtcgatccattaaacgcttcggataccgacgaattcttcgaagatagcaaatatttggcagactgcagaaagtgccatacttaagcgccatgaaactgtaagaactgaggcttatcgcgaagtgtcagagacttataggatattctaagctgaaaacagctcaactgggtgagtcgctgccctcacttgcttgataagacgcttatggaagtatacgattatgcatcattaccttgtgttgatacaagatcttgtatc

SEQ ID NO: 2714 - DNA, 405 bp, Lilium asiatic
  Clone ID: LIB3229-049-P1-K1-H7
cttccccttgccaatttttaactcccccctcacaaaatgccggctgtcgagttaccccccaccgaggctacagctccggtggcgaagtcccctaaggcggccaaagcgaaggcacccaaagcgaaggcacccaaagagaagaagacctcagccgcgaagaagcccgcagctcatcctctctacaatgagatgatcatcgaggcaattacttcgctgaaggagcggggtggatcaagcccacaagcaattgctaagtttattgaagacaagtacaaggctcacctcccggccttctttaagaagacgatccttgtccagctaaggaagcttactgcagctggtaagctcaccaaggtgaagtactcctacaagttatctgctaaaccaactgcagtcaagaaacct

SEQ ID NO: 2715 - DNA, 271 bp, Lilium asiatic
  Clone ID: LIB3229-049-P1-K1-H9
cggacgcgtgggtgcaactgagctctctgtcattgagagtgttttcaaattgagagaagcccagcctagttcgattgtcgaggagatgaggaagtcactcatcgacacatatgtctgatgagattgattttcatattagatgcagtatgaagttctgctttgattcgtcgctgcagcactgttttggttttttatattttgacattgtcagatctgtgctgccgtgtttgctttgatggtatttgtgttatttaatgtttatctttagatt

SEQ ID NO: 2716 - DNA, 275 bp, Lilium asiatic
  Clone ID: LIB3229-050-P1-K1-A1
cggacgcgtgggattttattctttacttagtgtggtgtgtgagctgaggctatgggagtgagacccgggtgccagatgaagatcatcggaagacaacacaactactcctcacaagagagttgcagagcttcttcttcttcctccagagtctccgccgcagctcaggtattaaggtttgtattcccttaggagatatgtgtgagtagtctatcaagggctccttcgggaaacccgaagatgtataatcttttataaataagatagacttttgtttg

SEQ ID NO: 2717 - DNA, 414 bp, Lilium asiatic
  Clone ID: LIB3229-050-P1-K1-A10
gtcgccgcgcccgcttcgccgccgccgccgtcgcagtcgccgccgctgtgaacagcgccccttcgccttgccgattgcaaggatggtgttcctcgacacagagatgacatggaacgtgctggtcaagcccgatcagcttgatgggaagagcctgctgctccagaaatcagtgatcatccgtctccttgcagacattgcaactaagaaggcctccaaggaacatggatactttgtagctgtcacctctttgaactcgataggcgaagggaagatgagagagctaacaggagaggtcctcttccccgtaaagttcaactgtatcacgatgaagccttgcaaaggtgaggttatgatcggaatagtggagaaagttatgaagcacggggtaattctcaagtgtggaccgatagacac

SEQ ID NO: 2718 - DNA, 384 bp, Lilium asiatic
  Clone ID: LIB3229-050-P1-K1-A11
attgtcaatgttgcttctcaatgtgggttgactaactctaattacactgagctgagccagttgtatgttaagtacaagggccaaggttttgagattctggcttttccctgcaatcagtttggagcgcaagagcctggaaccaatgaagagatagtagaatttgcttgcacccgcttcaaagcggagtaccccatctttgacaaggttgatgtgaatggggacagtgccgcccccgtctacaagttcctcaagtccagcaaaggcggcctctttggcgatagcatcaagtggaacttctccaagttccttgttgacaaacaaggcaatgttgtcgaccgctacgcgccgaccacctctccactgagcattgagaatgacatcaag

SEQ ID NO: 2719 - DNA, 403 bp, Lilium asiatic
  unsure (1)..(403): unsure at all n locations
  Clone ID: LIB3229-050-P1-K1-A12
gcgccgacaacactgttgcgaataatttctacatcatctcggtcaagggggtcgaggggcgcctcaatcggctgccatctgctagngtcggcgacatggtgatggcaactgtgaagaaggggaagccagatctgaggaagaaggtgatgccggctgtcattgttaggcagcgcaagccgtggcgccgaaaggatggtgtttacatgtacttcgaagataatgctggtgtcattgtgaacccaaaaggagaaatgaaaggttctgctatcactggacctatagggaaggaatgtgctgatctctggcccaagattgcaagtgctgccaatgctatagtgtattttcctgttgcctctgtagtttgacattaggagttttggcatctattttcagtgttttgata

SEQ ID NO: 2720 - DNA, 441 bp, Lilium asiatic
  Clone ID: LIB3229-050-P1-K1-A2
ccagagcgacccgccacggcgttcggccacgcgtccgcccacgcgtccgtaaccctagcccccatttgttcggtccaatctcaatcctggatggcgcccaaggccgagaagaagcccgccgccaagaagccagcggcgacgccgcccccagaggaggagaaggaggtggttccgccgccgccgtctgagaagaagccggcggagaagaagcccaaggccggcaagaagctgccggcagccaaggagggcgatgcgaagaagaagaagaaggcgaagaagtcgattgagacctataagatctatatcttcaaggttctcaagcaggtccatcccgatatcgggatctccagcaaggcgatgggtatcatgaacagcttcatcaatgacatctttgagaagctcgcccaggagtccgcccgtctcgcccgctacaacaagaag

SEQ ID NO: 2721 - DNA, 363 bp, Lilium asiatic
  unsure (1)..(363): unsure at all n locations
  Clone ID: LIB3229-050-P1-K1-A4
cccacgcgtccgtgggcctcgtgctaggcgttgagttcttgtgtttctgtcatggggggccgttgcgattatatcgtgtgaacatcgaagctgctttaatttaacaatcatccgctgtcttaactcaaccctattctcttgtaggcgcggtcgaggcgcgaggttattgcgtgcgttggatatctagtaatgtgtagttgtttagcagtggcgttactttggtttgttatggtactattatcgtagatgagatgagtgtatgaaactttagtatcgtaccctgtgcgtggtctatctttataacgctcggtttatttttctgtaatggttggtcaactgatggaactatncagcttctgtttt

SEQ ID NO: 2722 - DNA, 386 bp, Lilium asiatic
  Clone ID: LIB3229-050-P1-K1-A5
gctaggactacttccacctacctctacctttcccacaacaacctaaccgggccggtacgaccttcctttgcttcgacatctgtccaggtcattgatttctcccgcaaccgccttgccggagatgcctcgcttctgttaggcgccaagaagccactacagaatcttgatttgtcaaggaatttgttcgagttcgacctgactaaggtggtgtttccggagaatctgacgactctagatataaaccacaacaaaatctatggaagtattcccaagcagattacagaactgcaggggctgtacttcctgaatgtgagctacaacaggctctgcggcgagattccgaagctcgggcggtatgatcagtactccttcttccacaacaagtg

SEQ ID NO: 2723 - DNA, 415 bp, Lilium asiatic
  Clone ID: LIB3229-050-P1-K1-A6
ctgaatcaatctccgaccatccaagaaatggacgaaacgaaatcagtagataaaagtgtgaaggcacccaatttgtttgagagagctaaggaggaggtagaagcaatcatgcacaaggacaagaagaagacccatgataaggaaacccacggcacgagcgatgacattgacgagagcacgccgatcgacaaggtcaagggtccgagcgtgttcgagagggctaaggaggagatagaggcccttgtcgaagccttccaccctaagaaggaagagaaaaaagatgaagggggattcttggagtctctcgggagaagagagtagtagttgagctatttggagaggagtgtcttgattgttgaaagaggtttggtatagaaacacccctcggatattctatttgatgatgtatctttta

SEQ ID NO: 2724 - DNA, 194 bp, Lilium asiatic
  Clone ID: LIB3229-050-P1-K1-A7
ggtttagaaaccagcttgacgttttgtagtatccaagctcacctgcaggggcgtgagaaccctttgattatctattatgacaccaacattaacatactactccaaagatgtacatcgcagtgactgttataattccggcataacccaactcaaacctcatgcatcacattcagcattcgccaactagcgatata

SEQ ID NO: 2725 - DNA, 273 bp, Lilium asiatic
  Clone ID: LIB3229-050-P1-K1-A8
ccggctggaggcgccggacgtgaaggaagcggtggcgcaggcggtggaggcgggggctgtgctcgatggtgagatcgcttaagatgatgggccatgcaatggcggcttggttgggaaggtgaaggatccgtttggttttgtctgggttatagcttctgctgggaagggttgttgtgaggctgaagttaaagcctgatgttgtttctttttttttggatcaagccgtctatatgtgtaggggttaagcgtgcaattttgtctgcttgctgggtt

SEQ ID NO: 2726 - DNA, 431 bp, Lilium asiatic
  Clone ID: LIB3229-050-P1-K1-B1
cccacgcgtccgcttctactaagaagtctacttctactgttgaggccaaaaaagtgtcttctactaagaagtccaaggagaagagttctaaggggaagaaaactaaggatcctaatgcccccaagcgccctgcttcatcattctttctcttcatggatgactttaggaaggagtataaggaagctaaccctgatgctaaagcagggcctgctgttgcaaaagagggtggtgagaagtggaaagccatgactgatgaggagaagaaagtgtatgttgataaggctgctgagcttaaggaagaatatgagaaagcattggagaagtataatgcagagaaagatgggggtgctgatgttgatgaggctgaggtggatgccgaagatggtgataatgctgatcaggatgctaagaatgggaaggaaaatgagctt

SEQ ID NO: 2727 - DNA, 339 bp, Lilium asiatic
  Clone ID: LIB3229-050-P1-K1-B10
cccacgcgtccgggagaggagagagaaagagcttcttctccgtttctctatcctgcagcaaaggtgggaatggagaaagcactcacaaaggtcgggagcttgaaggtcggtaacttctggatatcgaagaaagccaaggaggagatctcttccatcggtgatgacctctcgcggttctcaaatactgtggaggagaaggcaaaatggatttttgagaaactaaaaggaaaaccacagaagtcgctgcctgaactcctccgcgagtacaatctgccagcaggcctctttcccaagaacataatctgctatgagttcgatgaactgaagtcgaaactgatc

SEQ ID NO: 2728 - DNA, 411 bp, Lilium asiatic
  Clone ID: LIB3229-050-P1-K1-B12
cccacgcgtccgatcggaccgttgtcgcaggactgggagccggtggtgagccgcaagaaggtccccaactgcgccgccaagaaggacgagaaggccgtcaacgccgcccgccgcagcggcgccgagatcgagaccgtcaggaaatctgctgctggaacaaacaaggctgcttctagcaacacatctctcaatacaagaaagcttgatgaagaaacagagaatcttagtcatgaaagagtgccaactgaactgaagaagaacatcatgcaagctcggcttgataagaaactgacacaggcacagctagcacagctgataaatgaaaagccccaaataatccaggagtatgagtctgggaaggcgattcctaatcagcagataatcagtaaaactgaaagggttctgggcacc

SEQ ID NO: 2729 - DNA, 430 bp, Lilium asiatic
  unsure (1)..(430): unsure at all n locations
  Clone ID: LIB3229-050-P1-K1-B3
tatgatgctcgattcgagccccttgatacctatgaatatcctgtggagtctggatacaagcgcccttacactgcattggactatgacatactggcaacaagctctactatgagacctgttagaagtaggccggctctcgaaacaagtgtttatccccgtaccagagattctttgtatgacgagtattccaggtttccaccgggtgagcgttttgactatggcaggactgagtttgatgctggtagacagtatggaaatcggttttctccgccaagtggtgctaccagaaagtactactgagtctttttaggtaagtaagttagttcgagaaattaggcagaggggcaaggaagagagtcatgctatactctcaaacataaggttcttacctttttatttttatctngaatatttagtttaatttcaactc

SEQ ID NO: 2730 - DNA, 416 bp, Lilium asiatic
  Clone ID: LIB3229-050-P1-K1-B4
ctctcttctctctctcagtagagctttctctctcctagggtatccatcgatccgtcgggagatcgccggatccgatcttccccggctgaaatccggcgactgattcggcatcatcggcttccaaattcctgccggcagcgatgtttctcgtcgactggttctacggcgttctcgcctcgctgggcctgtggcagaaggaggcgaagatcctcttcctcggactcgacaacgccggcaagactacgctgctgcacatgctcaaggacgagaggttggtccagcaccagccgacacagtacccgacgtccgaggagctgagcatcgggaagatcaagttcaaggcgtttgatctcggggggcatcagattgctcgccgggttggaaggattactacgcgaaggtggatgctgttgtgt

SEQ ID NO: 2731 - DNA, 410 bp, Lilium asiatic
  Clone ID: LIB3229-050-P1-K1-B5
ctctctcgtctccacctccctcgcatgcgattgcccaactccaccctccgaccaccatgaccaccaccaccaccacaagccccacccaccaaacccaccacctcaccctaagccccacccaccatgccccccacctcaacctaagccacacccaccaattttaccgcccagcccacctttgccatctccaccagtcccataccctgctccaacaccgcctccgtcagcgcctacgtgcccgatcgatacgctgaagctcggaggctgcgtcgacctcctaagcggtctggtgcacattggaatcgggcatgatgccaaagacaagtgctgcccactgctgaatgggttggctgaccttgacgctgcactgtggtctctgcaccgtgatcagagccaagctcctcaacatc

SEQ ID NO: 2732 - DNA, 280 bp, Lilium asiatic
  unsure (1)..(280): unsure at all n locations
  Clone ID: LIB3229-050-P1-K1-B6
gttgacttttaaagaagtgtattagtaggttatttgtgtattaaatnnatatgaaatnnatctggaatcttcnnctgagttttgtaccttatacccatatatgannaatatctgnngaatcttcccaagtttttgtactttataccatcggaatagcacttcttaatttattatttatatgaaatttagaaggcagaatatttttttgccttgtttnaaaaaaaataaaaataattttataaataattttttatatattatatttttaaatattttttta

SEQ ID NO: 2733 - DNA, 382 bp, Lilium asiatic
  Clone ID: LIB3229-050-P1-K1-B7
cccacgcgtgcgcccacgcgttctccctctcgtactgccacacgtccgcgcacgcgtgcactcgaggagagggaacctgcaatcaagaaaaccttcacctctcctgtgtcggaggaaagttaacgaacagcgtagtatctgctcaactctgtgtttattcagctggtttgctgcttgaggttattcgtttctaggtgggggttggaatccttttcgccataaacctctgattggcataaataagatggttcgcataagaatacttcatggataccgctagggctactactgaaagagaaatgtttaagcagcatggtatgtgagcaactagtgataattattccatccttctctttaatataaagcatgagttttgtcatga

SEQ ID NO: 2734 - DNA, 428 bp, Lilium asiatic
  Clone ID: LIB3229-050-P1-K1-B8
cccacgcgtccgataatttcctattaagatccgtttctgtcttgagatttagtgcgtctaacaagcaaggatcttctgttttaatcccttggtttttattggtggaaattactgcaaatgaatgttctccaagttggaggccactttcattatcgttcacaagcaagttgaaggcagccttctaagatttcatttgcatgtgtgtattatcgttcacaaagttggaggcagccttctaagttatggatcaagtatttgttttttacatcgttcaaactaggtttctgataacgggctgtagttttgtagttttgttttttaagttctgtgtgttatttaattttttttgagttctttgtgttatttaaatgttgtttgtatcggatattcactttcaacatcctacaaaaatgagcattcagtggatc

SEQ ID NO: 2735 - DNA, 424 bp, Lilium asiatic
  Clone ID: LIB3229-050-P1-K1-B9
gtggtttcggttgtcctcaccacctcttcttttgtcagtccacacgacaaccaacagaaagatgatacgcttgggcatatgactgtggagatttacgaggtgagaggcatccattctttgaacattgtggttcggaatattctcgatggaggcgtcaattgctctcggaggatagaccgtcatgggaagacaatgtctgatctcatcttgtgtcaggaaatcgatttgcctccatgttagataacactggatgcccatgtttcttatgatgagtcatttgctacatcatatatgtatatatgtatattctgcttgtccgtctgccttatatgcaaatatacgtgacaaataatttgtggaatctatgataaacttttgtgaaactgacattgatggaagtttgtggtataattgtagactgttt

SEQ ID NO: 2736 - DNA, 406 bp, Lilium asiatic
  Clone ID: LIB3229-050-P1-K1-C10
gtactctgatggttcatacagtgtgcctgctggtctgatttattctttcccagtgacttgccgtaatggcgagtggaccattgtgcaaggacttcccattgatgagttttcgaggaagaagctggatgcaactgcggatgagctgtctgaggagaagactctggcatactcatgccttaattaagttgtgatgccgagtttttatggattatgttctctttcgaagatctgattttcttggtgagggaagaccatggcatgcgagacaagtttatgaataaaactactagtgtggaaacagtagaatatcatctcatggtggtgttacattttgaatttccgtctcttcacccatttgctcataaatttttaactgtactggtttagccttgagacattttcaatg

SEQ ID NO: 2737 - DNA, 390 bp, Lilium asiatic
  Clone ID: LIB3229-050-P1-K1-C11
caaccctttctttctccatggctcgctccaagcagaccgcccgcaagtccaccggcggcaaggctccccgcaagcagctcgccaccaaggcggcgcggaagtcggcgccggccaccggcggcgtgaagaagccccaccgcttccgccccggcacggtggcgttgagggagatccgcaagtatcagaagagcacggagctcctgatccgcaagctccccttccagcgcctggtgagggagatcgctcaggacttcaaggccgacctccgcttccagagctccgctgtctcagcgcttcaggaggcctcggaggcatacttggttggtctgtttgaggacaccaacctgtgcgccatccatgccaagcgcgtcaccatcatgcccaaagaca

SEQ ID NO: 2738 - DNA, 385 bp, Lilium asiatic
  Clone ID: LIB3229-050-P1-K1-C12
gccgaaaatggccagtgaaccactagttgaatgtaaggtattgggagtgaagatcgcacctcggattcagcttgccttgtggtgtgtgattgtaggggatgttgcgagcactccaccatgcaagggtgttggttcgggcattgacttccccttcttaggagttctgaagcattcaaaatctgcttgttctagatttcttctgtttgtgttgtttttatggtttaatggacataactggagttctgaagcattcaaacatctccgtgctctagatttcttctgtttgtgttgttttgatggtttaatggacacaattacataatccaaccagacattttggttcctaatgtaatcgaaagttgaactatattgatgtcttttgatt

SEQ ID NO: 2739 - DNA, 428 bp, Lilium asiatic
  Clone ID: LIB3229-050-P1-K1-C2
atttctcccccaatttcaaatctccttccttcctaaaaccctaaccctaatcctgtgctccgatggcccgtaccaagcagaccgcccgcaagtccaccggtgggaaggctccccgtaagcagctcgccgccaaggctgctcgcaagtcggctccgacgactggtggagtgaagaagccccaccgctacaggcccggtacggttgctctgcgcgagatccgcaaataccagaagagcacggagcttctgatccggaagctgccgttccagaggctcgtgagggagatcgcgcacgattttaagacggatcttcgattccagagccacgctgtgctcgctctgcaggaggcggccgacgcgtatctggtggggctgtttgaggataccaatctgtgcgcgattcatgccaagcgcgtcacgatcatgccg

SEQ ID NO: 2740 - DNA, 284 bp, Lilium asiatic
  unsure (1)..(284): unsure at all n locations
  Clone ID: LIB3229-050-P1-K1-C3
tacatctnatatctgcttattctggggtagctngnngcggtaggcggacctctttcnnccccttnntcccgcccaagaaatnnctgcaaaagaaatgtcggtggtggcttgccccctaaaatggtggctcaagaaagtcgagccgacctcgacaatagggactcccagtgtatttttgaccccctccaaactcgagccgaagaaagttgtgcattctcctcacccgacctcaaatatcgagtttcaccacttcctcccttccgatggtgggtcgccagtatgga

SEQ ID NO: 2741 - DNA, 419 bp, Lilium asiatic
  Clone ID: LIB3229-050-P1-K1-C5
gcagcaatggcgtgctaaccgagacacatggttggaatgcacatacctcaaccaatagtttcatggatcggttatctgatattacaggaagtacaattcggcattcaactacttctgaaagtgtcactcgtaaacctatgcaaaatcatgcatcaacagaaagcccatctgatgtgtcacttggaacgagctctgaaaaggtcatcgacacattcttgaagaatccacttttcaacaataaggaggaactggagcttaatgaattggctggaaatttgcgctccgagaataatctgcttcaagtgttactgaggcaccaacaagccattgaggaactggtggaggagaatcagaagctgcgccgagtaatagtggaagatttgaaaagttcagctagcaagctccaaacaaacaatggg

SEQ ID NO: 2742 - DNA, 411 bp, Lilium asiatic
  Clone ID: LIB3229-050-P1-K1-C6
gtgattgatctttggactgcgtttcagaagagagatgactggctcaatgcttgggttactgatggcgttcatttatcatcggagggtagcaatatcgtggtggatgaaatattaaaggtggtgaaggaagctaagtgggagccatgtttgtactggaagtcgctgccggctgaatttggtgacgattcaccttatgacctcgtgttatcggacggattatcgactgccaatatatctgaggccacttttcatagggagcagtggaactagaattgctggctacaaggtattagatatcgctttcgtctctttcttcaagtaatgaagtgtctatcttagttagaatttgagtttgaatgttttagatgcgcaagattgtaataataaacattggaaacgtgaccatctagt

SEQ ID NO: 2743 - DNA, 248 bp, Lilium asiatic
  Clone ID: LIB3229-050-P1-K1-C7
gcggtgaccaatgcaaggaaagggagaagatgagctctgtacttgtgtggtattgattatactgtgacagtatagtatgcagagaatcagttcaactttgtgttgtattttcttgtaagcaaacaagttgttacctctcaagtagaaggaaaggagcttcgggctaagactgatttccatctaacttctcatttttgtttctttgaatttcgggatcattgttaatttaagttcatgaacttccctac

SEQ ID NO: 2744 - DNA, 398 bp, Lilium asiatic
  Clone ID: LIB3229-050-P1-K1-C9
gaagcttgtgatctaaagctgagaatatcactttttgacatagagtgggggcaagcaagcaggcttcttcttctggaacagaaaccacgggaactggacatgattgacttatttggaatggaaatagggatagatcttctctgtaaaggaatgtcataaatttgttattcttaagagaataaattggtcgagaagactaatttgccccaaaaatatgatatggtcctcggatatacccgctaaaatatgctttttcatgtgtaaagtcatttatggtactgttctcacaagggtagactgcagaattaatctggaagttccctcagtctgctgcgtctggaaactagtaatgaaagtatggaccatcttcttatgcgagttctctaagcaaacatgta

SEQ ID NO: 2745 - DNA, 275 bp, Lilium asiatic
  Clone ID: LIB3229-050-P1-K1-D10
gacatatttggagaacaataaggcgggaattactgtgttcggtattgtgttggaccggacatgtctgcacaccattttcttgctggagctgtctcttgtgttgtggctgctggggaagacgattgggctctcttgaatccagtttttgattgaattttgatggttggtgttgcatattatattgttggttaattattctcacatttgattatggttcactttattttttttaatatagacagataaaaagaggaggttgtgagttgcatgttata

SEQ ID NO: 2746 - DNA, 299 bp, Lilium asiatic
  Clone ID: LIB3229-050-P1-K1-D12
gtctcggcgatcagattattttgaagtcttaactctgctagcaacatggctcgtgccaagctaactgttcgcaagtccactggagggaaggcaccaaggaagcagcttgccaccaaggctgctcgcaagtctgcccctacaactgggggagtgaagaagcctcaccgctaccgtcctggtactgttgcccttcgtgaaatcaggaagtaccagaagagcacagagcttctcataaggaagctgccatttcagaggcttgtcagggaaattgctcaagatttcaagactgatctgcgatt

SEQ ID NO: 2747 - DNA, 429 bp, Lilium asiatic
  Clone ID: LIB3229-050-P1-K1-D4
ccggatttgcagggtgagaaagaagggaatccgtgtaccagggattggacacaggatcaagttccgagacaaccgtgacaagagagtgcagttgctgcaacaatatgctcacacacatttcccagcggtaaaatacatggaatatgctgtccaagttgagacctatactctcacaaaggcaaacaacctggttctaaatgttgatggtgcaattgggtctcttttcttggatctccttgcgggcagtggaatgttcaacaagcaagagatcgatgagattatcgagatcggttacctgaatggactcttcgtcctcgcacgctccatcggtctcatcggacatactttcgatcagaagaggttgaaacagccgctctaccgccacccatgggaagatgttctgtacacaaagtgagcagatttcgtgat

SEQ ID NO: 2748 - DNA, 285 bp, Lilium asiatic
  Clone ID: LIB3229-050-P1-K1-D5
ctacgggtctccccatgtttggagaacagttgagcttcatgcagcccgctgatttatgatactcctgacatttgtgcccaccatttactcgctggagctgcctctcgcgttgttcctgctggggaagaccattggtctctcttgaatccaggttttgattgaatttagatggttggcgttgcatattatattgtcggttaatcattctaacattatgagggtggcaaacagtttgtcaagtactgtagacaatacaaaaaaggaggttgcgagttgcatgttata

SEQ ID NO: 2749 - DNA, 317 bp, Lilium asiatic
  Clone ID: LIB3229-050-P1-K1-D6
cccacgcgtccgataatttcctatttatatccgtttctgtcttgagatttagtggtctaacaagcaaggatcttgtgttttaatcccttggtttttattggtggaaattactgcaaatgaatgttctccaagttggaggccactttcattatcgttcacaagcaagttgaaggcagccttctaagatttcatttgcatgtgtgtattatcgttcacaaagttggaggcagccttctaagttatggatcaagtatttgttttttacatcgttcaaactaggtttctgataacgggctgtagttttgtagttttgtttt

SEQ ID NO: 2750 - DNA, 410 bp, Lilium asiatic
  Clone ID: LIB3229-050-P1-K1-D8
cccacgcgtccggccctcaacacctctcgccagccatgggtcgaaggccagcagggtgctatcgccaaatcaagaacaagccttacccgaagtcccgctactgccgtggtgttccagacccaaagatcaggatctatgatgtcggaatgaagaaaaagggagtcgatgagttccctttctgtgttcaccttgtcagctgggagaaggagaatgtgtcgagtgaggctttggaggctgctcggattgcttgcaacaaatatatgaccaagtttgctgggaaggatgccttccatctacgagtgagggtgcacccattccatgttctgcgtatcaacaagatgctttcgtgtgcaggagctgataggcttcagactggtttgagaagtgccttcgggaagcctttgggaaca

SEQ ID NO: 2751 - DNA, 386 bp, Lilium asiatic
  Clone ID: LIB3229-050-P1-K1-D9
cttgaagcttctggaggcgcatgtggaagaagctcgccattggtcatgcatgcgagttgctgggagaagaaagggatgccagaccgaagttcaagcctataaagccccagcccgagcgaaggtttctcccaagcctcagaaggagaaggagcacgactctctgctgctgagcctccatcccctaaaaactttccttagtgacagaggataagtttgaaggagatggagtagatagggtagtaacttagcttcttgtttaattctagttatttcagtgtattctctttcgtgttgtagtcactttgccttctatttgtctgtaataattctcgttctagttcttatgtacttacactttttttctaatacaaagagttgctttatct

SEQ ID NO: 2752 - DNA, 317 bp, Lilium asiatic
  Clone ID: LIB3229-050-P1-K1-E11
catcgatagtggggctagggaccgatgaggactcactcacgcgagctatcgttttacgagcggaaaccgatatgcagatgatcaaagaggtgtataagatcagatacaagaccaccgtcaaggccgatgtcattggcgacacttctgggtattacaaggatttcttgcttaccttgattgggagcaaaaagtaaaaaacttatgaggtgataaaatggtatctgttgtgtctagctttataagtttttagaaactatgagattgattagatggaaatgattgtttgtggaagtaaataaacattagagttttctaaa

SEQ ID NO: 2753 - DNA, 178 bp, Lilium asiatic
  Clone ID: LIB3229-050-P1-K1-E12
cccacacgtgcggtttctttcccctcccacccaatataaccctaatccgatggagcacctcggcgtggagatctacgcttagtacaacgatctcaagaagaggaaggctctcatcgacaaggattggaaccttaagagagacgccgatatctgcgaattccaatcacccgtggaggtg

SEQ ID NO: 2754 - DNA, 265 bp, Lilium asiatic
  Clone ID: LIB3229-050-P1-K1-E3
gaagatttttacatatcgttttcttttggcgggtgtgggttaggtcgccggtgagaccgctaaacaacttttgttgagagaggagggcaggggagacaaagtttccgtctcacatataacttttaacctataataaacccattatcacaaacacagttgaaatgaatagcatatgtaattatatcagtttgtgatagaattaaatttataaagaatcgtgattggctgtcccgcccattttttttaatattataaaagaactgat

SEQ ID NO: 2755 - DNA, 422 bp, Lilium asiatic
  unsure (1)..(422): unsure at all n locations
  Clone ID: LIB3229-050-P1-K1-E7
attcggttgctggaggcattttcttggtgcgatcacttggcctatcaaggcagagagagagcaaacggggattagagganagcaaggcttttaccgaaagaagtgaagagctgtatgaggaattggatgaattgcagcggaacgggagggccctagaagataaaatggggcgatcagagcttaaccaacagtcttcaggcaacaagtgatctattcacaactctactgctctgcgataggtgccctgctgctataatttacaatcttgtttggaactgtcagtctacaacatgttgacaaaaactgtgtagcaatgttctagagagagagagagggtctaagttatcattgcgccttttaaaaaatatatgtataaaaaatttatataatttatggggcggccgctctataggatccaagct

SEQ ID NO: 2756 - DNA, 406 bp, Lilium asiatic
  Clone ID: LIB3229-050-P1-K1-E8
ggataaggaggggattcccccggatcagcagaggctcatctttgctgggaagcggcttgaggatggccggactggtggcggactataatatccagaaggagtctactctccatctggtgctccgcctcagaggcggcatgcagatctttgtcaagacgctcaccggtaagaccattactctggaggtggagagctctgacacaattgacaatgtcaaagccaagattcaggacaaggaggggatacctccggaccagcagaggctcatctttgctggcaagcagcttgaggatggtcgcacacttgctgactacaatattcagaaggagtctaccctgcaccttgtcctccgtcttcgtggtggccaataatgcttcctgtctggtgctttgttagttctctatct

SEQ ID NO: 2757 - DNA, 385 bp, Lilium asiatic
  Clone ID: LIB3229-050-P1-K1-E9
aggcaatgacagagcttatcatgcctcagttcctgctcctaagggcggaccacctgtgaaagtacaacctatagcagtccccaccattcctgtagatgagctaaaggaagtaactgataattttggaactaaggctttgattggggaaggttcatatggtagagtgtattacggcatcctaaaaaatgggagagctacggccattaagaagctagatgccagcaagcaacctgatcaagaattcctagctcaggtttccatggtatcaaggctgaaacatgaaaatgtcaccgagctacttggttattgtgttgatggaaatctgcgtttcctggcatacgagtttgcaacgatggggtccctgcacgatattttacatgggcgt

SEQ ID NO: 2758 - DNA, 370 bp, Lilium asiatic
  Clone ID: LIB3229-050-P1-K1-F1
ttttcgccaacttcgatatctccgcagcaaggaggtgattctgtgaaggtaaggaagcccgaggcagatgcggaatacgaagatctgatggcctctgttggcgtgaagtgactcagctctaccaaggtttctacttgccatagacgggcaagtattggattttggaccaatcattgtaactctaatgactaattatattgaaatcattgagtatttagtgggattttacttgccggttttgaaagggatacaaatgtaaaacaagtgatgctcacctcatgcattctgttgaataaattgttacaagggcattgttattgttcatgatttgctttatcacttatttttattggagtattttgatcaaaaa

SEQ ID NO: 2759 - DNA, 318 bp, Lilium asiatic
  Clone ID: LIB3229-050-P1-K1-F10
cccacgcgtccgctactgagtgtgagcgactgccctctgctcatctcccgatggctagcgtgaaggtcttcggctccccaacatcgacagaagtcgcgagggtcctgacttgcctcttcgagaaggatgtcgagttccagatcatccgcattgagaacttcaagggtcaggagagaaagcctgattacctcaagttacaggtaccagtagtactacctcaacataccaacatgtttgcacatttagggtttagcgttcaccatgaatatgtgttgtgcttcacgaatccatgcataacctactcactaacttgttatc

SEQ ID NO: 2760 - DNA, 461 bp, Lilium asiatic
  Clone ID: LIB3229-050-P1-K1-F11
ggtacggtttcgcagggtcggcctcgacccacgcgtacgcccacgcgtccggagtgaacgactactaccagaccttcgacaacaaccggccggcgctcggcaacctctaccaggactcgtcgatgctctccttcgagggcgccaagacccagggcgcccaagccatcgtcgccaagctcaccggcctccccttccagcagtgcgcccaccagatctccaccatcgactgccagctctccggccccgccggcggcatgatcgtcttcgtctccggctccctccaactcgccggcgaacagcacactctcaagttcagtcagatgttccatctgatgccgacgccccagggaagcttctatgtacagaatgacatattccgcttgaactatgcatgaggtgagttataaacagcaggaatgtactagccagctaggacctgaaactgcagaattttattggac

SEQ ID NO: 2761 - DNA, 325 bp, Lilium asiatic
  unsure (1)..(325): unsure at all n locations
  Clone ID: LIB3229-050-P1-K1-F2
cacgccaccgctacttactngaatcttatttccctctcctcatcacccancgcgagcgggtacctcttattttatgcgacatccacanaaccccccaggcccctaacttacctactccaaacaaatgtccaactccacatcaaccgccttgataactacattggtcctaacataaaacctcaataccccaagttacatgtaccaaatttactacctcaacataccaacattctcgcacatttatggcttacccctcaccatcaaaatattctcatcttcaccaatccatccataacctactcactaactctttatcatattcaac

SEQ ID NO: 2762 - DNA, 361 bp, Lilium asiatic
  unsure (1)..(361): unsure at all n locations
  Clone ID: LIB3229-050-P1-K1-F4
ggcatgcaaagcttacatggatggtgctcaggttggatgtgtggtaggcgatggagtccaggatgtcgacgagggtgacaagagttgctcatccaatttcaagagctcgctgaaaaaactttttgaggacctattgatggagttcactgtcaaaggagccgactgcgatcagttccttgctcagaaagttaaagatggagcctcaaaagcagtagatactcgattgaagctatgagatcaggttccagtactggtgcggctggctttgcctncaattggtatttcgcatttatttatatagattagtccagaatgaactggttgttaaagtgactgcctaaccttatgagtcgtgtaaata

SEQ ID NO: 2763 - DNA, 407 bp, Lilium asiatic
  Clone ID: LIB3229-050-P1-K1-F6
atgctattgagtttgctcaagaggagcttgcgccaagggccatggcagatgaaggttttctacaggaagtggagagaaccatggctctgcttgtatttgtggatgtaaacaattgtgaatataaagagcttctagatatgtcacgtcgctcgagaactggcactgaagggaatgcagacatactagctagccagagtaaaaaaaaagatccaaagcttcccaacttgttgaagatgctgttatgggcacaggacaggcttgacaaaaaggttgtttatcctcgtataaatagctaggttgacagcagcacttgagccaccaggaatgttcgtcatgttgaatacagcggaaatcgaattgttggtacaaatataacgtactggagtctagtaaacatgtaaatatct

SEQ ID NO: 2764 - DNA, 403 bp, Lilium asiatic
  unsure (1)..(403): unsure at all n locations
  Clone ID: LIB3229-050-P1-K1-G1
atcccgagttcgcaaagaagctagcgtctcttgctgacctgtatgtgaatgatggttttggcactgctcacagagctcatgcttcaacagagggagtcgccaaattcttgaagccagctgttgctggatttcttatgcagaaggaactcgattaccttgttggagcagttgctaaccctaggagaccgtttgctgctatagtcggaggctcaaaggtttcatcaaagattggagttatagactcactgttcgagaaggttgatatacttttcctaggcggtggaatgatatttaccttttataaggcacaagggtactctgtcggttcttctcttgtggaggaagacaagctngagcttgcgaccgcacttatggagaaggcaaagtccaagggggtacaact

SEQ ID NO: 2765 - DNA, 252 bp, Lilium asiatic
  Clone ID: LIB3229-050-P1-K1-G11
aacaaaaaaaaaaaaataaaaactaaaatttaaaaaaacaaaaaaccaaccaggaaaaggaaactatttatttgtatcatttaaaaaaaaaacaaaaacattattaaactatataaaaaaaacttaattaaaaaaaaaaaaatcaaaaaaaatccttggtcccttccctctttaaaaatcaatattttttccaccttcttctcccaatatattctttttttatgtctccccatttctaatttattatcccca

SEQ ID NO: 2766 - DNA, 392 bp, Lilium asiatic
  Clone ID: LIB3229-050-P1-K1-G3
cggacgcgtgggatttttttccaccttccaacaactccacaaccaccttcaccctccaacaccggcaaaagcttcatcaaggtacatctatctactctcttgtcccctttatgtcttatttggattgttatgtgtaggattttggaaaagatcggatttgtgtggcaaaatgaggaaaggatcaaagctcaagaaggaaaagagatgttgcaagcttgatgagtatgtgctctcggatctataagtacccctccacccccattggattggaggtaagaggtctcactccggcccgagtgggggagggcacattgttggccgtctttttctcggtttggaggaggcacattgggagagcatctacaagtgatctcggagtggagagttcatca

SEQ ID NO: 2767 - DNA, 371 bp, Lilium asiatic
  Clone ID: LIB3229-050-P1-K1-G4
gggcattgtaggagaccgaaaaaccgtgcttgaaaccgagctccttcaaatgccctacgtgaaagcagtgatgaaggagatttttcgcctccatccagcagttccagttctagtccctagagaatcaatggaacatgtttcgatcgacggctggaaggagagggtgccccggtatcacatttagtgtagcgagcgtcgaacttgcgctggcacagttactccacagcttcgattgggagcttccggccggtgtccgagcagaagatctggatatgactgaggtgtttgggatcagtatgcatagaaagcagaaattagtggtcgttgccaaaccacatttcagttcatatgctagtacctaactatgatgt

SEQ ID NO: 2768 - DNA, 412 bp, Lilium asiatic
  Clone ID: LIB3229-050-P1-K1-G5
cccacgcgtccggtcaaccaggacccaccagccttatgtgatcaaacaataatgggggcggtgaaagttgcgacgaaacaattggatcttagtaacaagttaatgattagtagggcctaccatgattaactcttaatggccagagtttcaccaatgggtatgatcttcattccgtgctacaaaggttatagtcacaagcctgaaaagtatgcatctatcgagcacattgctaatggggttagggtattagccttaactctcgccaaactgtcggtctgagtgatttctggtgcaaaatgtggtttgcatgggaggctcatcttgctgtaagtctacgaagaaaacatatttggtacattatgattgtttatttaacagttgatccacaatttttttaaatcattgtgaatcc

SEQ ID NO: 2769 - DNA, 385 bp, Lilium asiatic
  Clone ID: LIB3229-050-P1-K1-G6
cttgaagcttctggaggcgcatgtggaagaagctcgccattggtcatgcatgcgagttgctgggagatgaaagggatgccagaccgaagttcaagcctataaagccccagcccgagcgaaggtttctcccaagcctcagaaggagaaggagcacgactctctgctgctgagcctccatcccctaaaaactttccttagtgacagaagataagtttgaaggagatggagtagatagggtagtaacttagcttcttgtttaattctagttatttcagtgtattctctttcgtgttgtagtcactttgccttctatttgtctgtaataattctcgttctagttcttatgtacttacacttttttctaatacaaagagttgctttatct

SEQ ID NO: 2770 - DNA, 414 bp, Lilium asiatic
  Clone ID: LIB3229-050-P1-K1-G8
gaagcaatttggacggcaaacattcacgattgcatccatggcaaggtgtggcctatcatgggcgccggctaccacaccatccaccacaccacctatcgtcacaactacggccactacacaatatggatggactgggcctttggaacactccgtgatcccgaagctgaagaaggcaaggtagcgtaagagttaaaatggatcaaaccaccgttgctatgtctcttgcatctttagctttatgaataattccagaaacttgtgtgtaactgtgcactggcaccggggaaggaacttttaagtgggtgtaggcgatcttctggatttgttagttgtgatgcctttgtgtttggtctctctttttcatgttactcggcttatgtccgacaccaagcatttggtagtatgaagtatgtg

SEQ ID NO: 2771 - DNA, 409 bp, Lilium asiatic
  unsure (1)..(409): unsure at all n locations
  Clone ID: LIB3229-050-P1-K1-G9
gggaaacatcagaatcacgagaagggtctaatacagcaatgcctgatatttctaatggcgtgctagaatcagatagtgttgctatggctgttgcagtggatggaaatggctttgatgctagcagtttgcctgaaaaggttgatgtttctggtgatgagactacatgcgttaagctgtctgtgactggtgactctgttttgaatttggagggtgtggaacatgttgacaaaactcctgataacttgggaaagtagatgttgtgcaaaaggcgttgaagttgagacgctcttgatggccatggaaaaggggaagtaatggtgtggggcatttgttggatcaatgaangtgaatggatgtagcctgtcaaggatggggtgagtgtatatttgaaggctttgttatatcaagg

SEQ ID NO: 2772 - DNA, 425 bp, Lilium asiatic
  Clone ID: LIB3229-050-P1-K1-H10
cagactttgaaaaatgccctgtcaccatataaacttggaggtgctgcaggcggaagtgattttgatccgaaggggaaaagtgagaatgagatcatgcgattttgtcaaagctttatggatgagttataccggtatctcggatctgacaaggacctccctgcagaggatattggtgttggtccgagggaaatggggtacctctttggacagtataaacgtctggctggtcattatcaggggagttttacaggaccgaaaatcttctggtctggttctagcctgcgaactgatgctactgccttcggactggttcactttgcacattcaatactttcggagatgcacaaggacattaaaggaattagatgcatagtcagtggcgccggaaagatagcaatacatgtcatagagaagctttttgttgg

SEQ ID NO: 2773 - DNA, 284 bp, Lilium asiatic
  Clone ID: LIB3229-050-P1-K1-H11
cccacgcgtccgttcattaccaccaccatcttatgagctttcacgcctgctcatcccatatgaacttagtcatattctgagaggaccacgcaccctccaactctttctacaattagtccaaatttcattccaaaataattgcaaactattccacctatccatacctctgtaatccattacattcccaccgatatattataagttcctgaatacaataactacaacccttcattacaattttcttaaaacctgtctccgacttactactctcccctattaaacca

SEQ ID NO: 2774 - DNA, 432 bp, Lilium asiatic
  unsure (1)..(432): unsure at all n locations
  Clone ID: LIB3229-050-P1-K1-H5
gggcgccgcacgtgccaagggttcacttccacccccctccagccctaaccgaaactcccccttcccccttctcgatcaatcggggcgtttcttcctcggcaaagatgctgttcttctcgtacttcaaggaattggtggggaaggaggtgacggtggagctgaagaacgatctcgcgatcagggggacccttcactcggtggatcagtacctcaacatcaagctcgagaacaccagggtcgtcgatcaggacaagtacccccacatgctatcagtccggaactgctttatcagaggttctgtggtgaggtatgtccaactccccccggacggtgtggacactgaaattcttcatgatgcgaccagaagagaagcccgcggaggttgatattagtccgcgtggacactttctngtaaactttggtgattttaga

SEQ ID NO: 2775 - DNA, 351 bp, Lilium asiatic
  Clone ID: LIB3229-050-P1-K1-H6
gccaggaggtggaagttctgtggggttcactatggagcctggaggtgctgacaggttggaggtgccgcttctgtttggaacttagaggctttgctgaggaggtgttgtctactagctggagctgctcttgtggatcgaccttcatcttgtagaggtgagtttctgatcaccgggaccattgtatgctatagaggatagtaatgttcatgcatatgtctgctagtgttgatacctcactgtatgaatgaaaagaagattaaagtagtgttaattgagatatgaacatgctttccattgtataaatttaatgttagactgaatgcttctagatgctcatgcttaagtgatgaa

SEQ ID NO: 2776 - DNA, 390 bp, Lilium asiatic
  Clone ID: LIB3229-050-P1-K1-H9
agcagctagtgatggaatgtgttgatcagcttggccgtatgttcaagcgggacggcaaggccattaagaagaggatcgaagatctgatcagcagggagtacctggagagggacaaggacaatcccaatgttttcagatacctagcttgatcttaaaccgagcaagccatcaacagaatacttttgctgctacaagggaactcttgtcgtaaatttctctaaatgccatatcccggcaactttctagagatcctatcagtttgagggttatgataacttgaaatctatgtttgtagtgtgcggatggtgttccattttgttatttttccttagatgctgacttaataaccctgtattaaaatgggtgggtcatattacttcttcttttttg

SEQ ID NO: 2777 - DNA, 376 bp, Lilium asiatic
  Clone ID: LIB3229-051-P1-K1-A1
cccacgcgtccgaaggactccagcggtgccttgcggtttatggtttctaataatgattgtggtgtgcgagactatgatgttgagagatttcaactcttgaatcacttccagttcccatggccggttaatcatacatccctgagcccagatgggaagcttgttgcagtaatgggggatcaccgtgatgccctgttggcggattcacgaagtggacaggttattcacgcgctggaaggccatctggattactcattcgcctcagcatggcatcctgatggacggactcttgccacggggaatcaggacaagacctgccgtgtttgggatgtgaggaacctctcatcggcagtttcggttttgaagggtaatttgggtg

SEQ ID NO: 2778 - DNA, 67 bp, Lilium asiatic
  Clone ID: LIB3229-051-P1-K1-A10
ggtcgaccgcatgcgctccacgcttcttgggacgccagtcatactgaactaggggctgcggccagag

SEQ ID NO: 2779 - DNA, 357 bp, Lilium asiatic
  Clone ID: LIB3229-051-P1-K1-A11
gcgccagagaatcggccaacagcagctcagtgcctgcagaatccatgggtcaagagcagggaatcaaagcctgcgactgaaacgacgaaatcacacatggaagagatgatggttggcatgagcaagctacaagtcaggtaggtgaagtgattttggcaccttgtacatgatcagcaattttgagatcaaattgtgctagactgcctgcggaaaggtttggccagcatgactttgccccaaagcaaaagtgctctgtgaaaatatatgtttgtatggaagcataggtgaacaatcatgacattgcgaggcctattggaggaagcaacttaaatcatgcaatggagggcaatgatttta

SEQ ID NO: 2780 - DNA, 425 bp, Lilium asiatic
  Clone ID: LIB3229-051-P1-K1-A12
gccgccgccgccgctgccgctgctgccgcccgccggagaaatggccgttccgcttcttaccaagaagatcatcaagaagcgcgtcaagaagttcaagaggactcagagtgatcgaaagatatgtgtcaagcaaagctggcgtaggccgaagggtattgactcccgtgtgaggaggaagttcaagggagtaactttgatgcccaacattggctacggctcggacaagaagacccgccattacctgcccaatggtttcaagaagtttgtagttcacaatgttgccgagctggaattgcttatgatgcataacaggacatactgtgctgagatagcccacaacatctctacaaagaagcgtaaggttattgtcgagcgtgctgcacaactggacattgcggtcaccaacaagcttgccaggctgcgca

SEQ ID NO: 2781 - DNA, 299 bp, Lilium asiatic
  Clone ID: LIB3229-051-P1-K1-A2
cccacgcgtccgcccacgcgtccgggtgacggaggcggcgaggatgacgctccgacgattcggggattagtcgccatcgcagatgtggtaccagccggcgtacgaggagacgaaagggagaatggggaagggggatatggtgtggatgctggcgatggttaaaagagtatgtcctcatatatgttatgttgttgtatgcttataccttatgaacagtcttgcctcttactgctcaactgagttttttttttaaatttgctttatcaacaaaaaaaaaaaggaaatgaaggagaggctga

SEQ ID NO: 2782 - DNA, 359 bp, Lilium asiatic
  unsure (1)..(359): unsure at all n locations
  Clone ID: LIB3229-051-P1-K1-A3
ggagaagaaggcctccgtcgcgaagaagcccgctctccatcctacctatcttgagatgatcagtgaggctatcgcttcactgaaggagcgaaccggatcgagccagatcgctatctcgaagtttgttgaaaataagcataaggctcacctgccggccaacttcaagaagctcctcctcgtccagttgcggaaactcaccgncgccggtaaactcacanaggtaaagaattcctacaagatctctgccaagcccaccactgctgctaagcctaagtccacctctgcaaagtccaccactgttgctaagaccaagtctgatgctgccaagcccaagtccactgccgcgaaagtgaagaaag

SEQ ID NO: 2783 - DNA, 308 bp, Lilium asiatic
  Clone ID: LIB3229-051-P1-K1-A4
cggacgcgtgggtgtggaaattattgtctatgaccagggaaaccgtatcaccccgtcgctgatgtctgttactgaggacaaaagacatatcgtccatgcactgaatacaattctcagttgcctgaccaaggcgcctattgttcgatgcgacactctaatggtgagtagcatactataactaggaggctctgatggacatcatactgaggccatacatgattgtggacccggatggcaacacgatcttcgagtacaagagagatgagctgaaccgagttgtaaaggatccaagctaacgtacgcaagca

SEQ ID NO: 2784 - DNA, 426 bp, Lilium asiatic
  Clone ID: LIB3229-051-P1-K1-A5
accggctggcggattcgaactccgttgctccgattagcaagcttcgtgttggacaagtgtatgctgcgtctgtgatgtatgggtattttctcaagagggttgaccagcgatttcagcttgagaagtcgatgaagacgctcccgtgggggtcggatgaggaggagagtgctatcaggcaggcggttgctgatgaaccgcagctgtcggatcgacttagcactccccctgagtggactccgtcggcggctaccattggttctgcggttggtgaccacggaaccaggcagtcacggctgaggtcttatgtgatgtcctttgacaaggagacactgcatcggtatgcttcgatacgatcgaaagaggcctttagtattatagagaagcacacagaggctttgtttggtaggccggagattatgatcaacc

SEQ ID NO: 2785 - DNA, 166 bp, Lilium asiatic
  Clone ID: LIB3229-051-P1-K1-A6
ggcaaccgctcgttcctggacacagaagtatgctatgggttaatgttttttaggtgttaatgtgggcactatatgctaccctttatcagttaataaggatagattgttattgtgtggatcagttaacatttgaatttgttcaatggttatggttatgcttcttgtg

SEQ ID NO: 2786 - DNA, 210 bp, Lilium asiatic
  unsure (1)..(210): unsure at all n locations
  Clone ID: LIB3229-051-P1-K1-A7
tccgcccactcatccgggtgtctttttttttcaaggataacactccgcgcganggttgaaaatnttttggtgttaggtatgctaccagcctgcgtacgaggagacgaaagggagaatggtgaaggggtatattgtgtggatgctcgcaatgttttaaatagtataaccacatatatactaatttctttttatgcttattccttaattaac

SEQ ID NO: 2787 - DNA, 296 bp, Lilium asiatic
  Clone ID: LIB3229-051-P1-K1-A8
gctctgtatcagtcgaccatcaagcatggggacttcttgttgaaccgcgtccagaagctctctcgtgtgatagatttgtaaaccaagtttgttgtggaagtacgacggaggcttccttcgcatttcttcagtttcagaccgactcatttcttcagtttcagacagactcttggagaaaaatctacaatgaaacatagttaatattactgtattagtttgaaaattgttctctgatttcttatctactttcgttcctgatgcactaatgaagctttaaatgttcagcgttagatttt

SEQ ID NO: 2788 - DNA, 419 bp, Lilium asiatic
  Clone ID: LIB3229-051-P1-K1-B1
ctccatcaccatctcctccaatggcagtgaataaatcttttcttgctctcgtcctcctctctttgctcctctgcactggtgtaacaatggcagtctctctgtccaaggacatgctagagcaagatgatgggatgagcctggttgcaaagcataagcacaagcattctggattctcccaacaagagtgcccaggcgcatgtgattacaggtgctcgaagacggcgtacaagaaggcctgcctgttcttctgccagaagtgctgcttcaagtgcaggtgtgttcctccggggacttgggcacataaggaggtatgcccgtgctataacaactggaaaaccaagagtggaggccccaaatgcccttgaaggttcctaactatcccgtcgagcttctggttcacgaaagtatgaagaaagatg

SEQ ID NO: 2789 - DNA, 76 bp, Lilium asiatic
  Clone ID: LIB3229-051-P1-K1-B10
agacggcgatccggggcccagcgtcggccctggcccgacgcacctacgcctgacgcgccatgttcgacgtgcgacg

SEQ ID NO: 2790 - DNA, 224 bp, Lilium asiatic
  Clone ID: LIB3229-051-P1-K1-B12
accacttagagcagggggtgtttgatacaaaaatatcaaataagaataggatttttcatatttgatccaaaaacatcaaatatgataaatgcaaagcatattcatcctaacaccctcatgaacatagttatgaaaggcgcgcctaaggcgataaagaccgccgccacccccgcgtcgccgctccaggccgccgccgctccaggccgccgtcgccgcgccgccag

SEQ ID NO: 2791 - DNA, 270 bp, Lilium asiatic
  Clone ID: LIB3229-051-P1-K1-B4
actcaaactcttacaactcatagctagacatcatagtgaccaaagctcaatcccattacacagagaaaacctaggaagcaaccaacatgaaataacctgaacttgaaacctaaagaccaaccccttcaatccatcatctagtgcttaaagtgcccttcattggcctgcttgaatagctccgcctgcgactccgctgccttgttcgatcccacggccgcagtgaagccatccctcacttgctgagtagtgaacacaaacttcttacctagt

SEQ ID NO: 2792 - DNA, 154 bp, Lilium asiatic
  Clone ID: LIB3229-051-P1-K1-B5
acccagctttcttccactcttacactttttctttcaacaatcacaacccatcggggggcggatccaagtttacggttgcgtgcattcaaccacataaatcttttatagcaactcccaaatactaacctctgcctctaaacttaacataccaacc

SEQ ID NO: 2793 - DNA, 299 bp, Lilium asiatic
  Clone ID: LIB3229-051-P1-K1-B6
gttgccatatatggtgttggcaggctgctgttgccgtttccttcgcccaagcggttctggatcggggctagactgatttcggccgcctcgggaataatatttcccataatcaaagcagaagggatcaggcaagtgttcttccctgggactgtaccggcatattacagaactcctccaacgaaggcttgaatgccaggggtctattagtgttgatggatctcaattatgtattattgaacaagggttacgtccttggtttggatgcttacatgggtggtagctgaaggatggatcttgga

SEQ ID NO: 2794 - DNA, 408 bp, Lilium asiatic
  unsure (1)..(408): unsure at all n locations
  Clone ID: LIB3229-051-P1-K1-B7
gcgagatcgacggccagcacctcaccgccgccgccatcatcggccacgacggcagcatctgggcccagagcgaatcgttcccccaggtcaaacctgaacagataactggggttatgaatgactttgctgaacctggatctctggcaccaactgggttattccttggtgacaacaaatacatggttatccagggtgagccaggagcggttattcgcgggaagaagggatcgggaggtgtgaccatcaagaaaaccaacatggctttaattgttggcatatatgatgaaccaatgactcctggtcaatgcaacatggtggttgagaggcttggtgattatctctatgatcagggcttttaaggtttactgtgtgattttctgcgacctattntgtttcttttggtacttt

SEQ ID NO: 2795 - DNA, 311 bp, Lilium asiatic
  Clone ID: LIB3229-051-P1-K1-B8
agatacccagtttatggattttatgtttaatgcttacgcaagtatgggagtgcgaatgttttgaagaccttcactgatctttttgataacttccctctgactgccttggtcgaatctgaaatattttgcctgcacggcggattatcaccgtcgattgagacccttgataacataccaaatttcgatcgcgttcaagaagatcctcatgagggacccatgtgtgaactcctatggtctgacccacatgaatccttgggtttggtggaatttctccttgaaggagcttggataccccttttgtacaagatatt

SEQ ID NO: 2796 - DNA, 236 bp, Lilium asiatic
  Clone ID: LIB3229-051-P1-K1-B9
agtgcccagaccatcgccactgtgcaggatgctgctgatatgatcgaggagcttatggaggcaaagtgaagttagggcgatgtgaatgtttgtcatgcttgtttatctctttattttcttccttggcaatatatgttatctgaattcgtgagagtcgggtgttttctgttttattatagagataattatgcaggctgttaatgattttgcggaataaatgaaatatctatattgaa

SEQ ID NO: 2797 - DNA, 124 bp, Lilium asiatic
  Clone ID: LIB3229-051-P1-K1-C1
gggggttgatcttgttctcctgtcctgggtctctgtttgtttttgtttggatggtaatttgggttttcaagagctgtcttcatatatctcgtatgaaatgcaattaccttaccgttgcttgttt

SEQ ID NO: 2798 - DNA, 372 bp, Lilium asiatic
  Clone ID: LIB3229-051-P1-K1-C11
gcctgaggcaagagagatccagcgagagatctgagctcggtcgcccgaagatgagggcgaagtggaagaagaagaggatgaggaggctgaagaggaagcgccgaaagatgaggcagcgatctaagtagatcctgatgcagtggccttcatcaagtggaagatagttgattggtctttcatcttgctgttggtttctctgttaatgtctggccttaaaatgcttaggcatctaaatttcctgttttgcagctttagtatgtcctaagacttcaaatgttatgctttttgttgactatgtgtgagacaatggtgttgaaccatatttgatctcttttgagatgtttaatgttgaagggtagttatttctagatt

SEQ ID NO: 2799 - DNA, 417 bp, Lilium asiatic
  unsure (1)..(417): unsure at all n locations
  Clone ID: LIB3229-051-P1-K1-C12
cccacgcgtccgcccacgcgtccgcctacgcgtccggacgtgcgcttcgaacttgtngccgactctgcccaatcgaccgaaccgacatacaaagggttggactgaagcggcaattattctattcggcgaagaggaagaatggtactgaaaaggatttccttgatgctgtcaacaaggtcatcaagggataccagaagttcagcgccaccccgaaatatatgggttacaactgaaaattcttggagggattgtaagaagttgatggaagttaataaacgtgaaaatacatgtgtgctatcttatgttttatgggaaccggaatttggttaaacattcacacagttactggtttagatgaatgtgatcaattggttttgtgaagctttttnnanaaaaaaaaaaaaaaaaataaaaata

SEQ ID NO: 2800 - DNA, 248 bp, Lilium asiatic
  unsure (1)..(248): unsure at all n locations
  Clone ID: LIB3229-051-P1-K1-C2
agctggcacggactccatcatcagcatcgaccttttcgaccgggatggcaacggcatcggaatccccaacctggaggcgtggggcgggttgatgggagctgattacaactacttcgagaggggcaatctcgacatcttcagcggccggggaccctgcctgtctttgacgccatgctccatcaatgtcacctccgacggcaccggngcataccatggttggtactgcaactacatcgaactcacagtga

SEQ ID NO: 2801 - DNA, 418 bp, Lilium asiatic
  Clone ID: LIB3229-051-P1-K1-C3
gggcgacccacgcgttcgagctggcacggactccatcatcagcatttaccttttcgaccgggatggcaacgggatcgggatcctcaacctggtggcgtggggacaattgatgggagctgattacaactacttcgagaggggcaatctcaacatcttcagcgggcggggaccctgcctgtctttgacaccatgctccatcaatgtcacctccgacggcaccgaggcataccatggttggtactgcatctacatcgaactcacagtgactgatccgcatctcccttgtgatcaacacctgtttacgatggatcagtgactatctactgatgcgtcgccatacaagctgtttgcggaggtagatgtcctgccctcccgctgaggacatcgctgtcccctgagctggaggtggaggccatgg

SEQ ID NO: 2802 - DNA, 238 bp, Lilium asiatic
  Clone ID: LIB3229-051-P1-K1-C4
gggagctcaattgatccattagcgcgatgtcggatcggctcactaggatcgccatcgtcagctccgatcgctgcaagccgaagaagtgccggcaggaatgcaaaaaaaagctgtccggtcgtgaaaacaggtccccaatcccctccctgatctacgtaattgcatgcttttgatttatgtgtgatttttagtggacatgtatgttgaactgattacatgattggatcaattttagatt

SEQ ID NO: 2803 - DNA, 405 bp, Lilium asiatic
  Clone ID: LIB3229-051-P1-K1-C5
atcaacggcgccggtttggagcgctgacgcttcgacgaggatcaactactacgccgaccgtgtgggagcggccctgtgacctgaactatgtgaagtcggggctcggctactgcgaggttgccgtcggaacaggcgttccgccgccacgcggcgaacttatcaacgtccattacactgcaaggtttgctgatgggactgtatttgatagcagttataaacgcgggaggccacttactatgcgtatcggtgttggaaaggtcttgccaggattggaccaagggatttttggtggcggtggcgtaccttcgatgctcgttggcgggaaacgaaagcttctcatacctccattgttagcatatggacccgaaccagcaggatgcttttcaggtgagtgcaacgtgcctg

SEQ ID NO: 2804 - DNA, 304 bp, Lilium asiatic
  Clone ID: LIB3229-051-P1-K1-C9
cggacgcgtgggaaaaaaaaaaaatatttaaaaaaaaaaaaaaaaaaaaagaaagtggaaaaataaaaaatatatatataaaaaaaaaaaaaaaaaaaaaaaaaataaaaaaaaaaaaaactccaaaaaaaaataaaagggggggccctttttaagaattcaatttttttttccctttttttccaattaattatttttttttttggccaccaaaattaaatttatttgccctttttttaaaaccttggtcttggtaaaaaccttgttttacccaatattaatccttttgaacaaattccctttt

SEQ ID NO: 2805 - DNA, 404 bp, Lilium asiatic
  Clone ID: LIB3229-051-P1-K1-D1
agaaaaggagttcaaggtgcgcaacctggtcctgtgcttgactggatgcaacgtgtgagaattgcaattgatgcagcaaaggggctggagtatcttcatgagaaggttcaaccttctataatacaccgggatatcagatcgagcaatattctcttgtttgaggacttcaaagcaaaaattgcagacttcaatctttcgaatcaagcccccgacatggctgctcgtctacattctactcgtgtgctcggaacctttggctatcacgcaccagaatatgctatgactggccagttgacacagaagagtgatgtatatagttttggtgtcgttcttttggagcttttgacaggcaggaaaccagtggatcatacaatgcctcggggacagcaaagtttggttacttg

SEQ ID NO: 2806 - DNA, 424 bp, Lilium asiatic
  Clone ID: LIB3229-051-P1-K1-D11
ccctccctcgccacagatcgagatccagcttcttcttcatctccggcaccggcgcaatggaatcttgtccttctataaaaaacattcttctccttgattctgaagggaagagagtagctgtcaagtactatacagatgattggccaacactagcagctaagttagcatttgagaaatctgtatttaccaaaactcagaagaccaatgctcgttctgaagcggagataacaatgtttgatggctacactgtagtctacaagttcatccaggacctgcatttttttgttactggaggggatgacgagaacgagctcattctagcaacagttcttcagggtttttttgatgcagttggccttcttctgaggagcaatgtcgacaagaggacagcacttgagaacctggatttgatccttttatgcct

SEQ ID NO: 2807 - DNA, 60 bp, Lilium asiatic
  unsure (1)..(60): unsure at all n locations
  Clone ID: LIB3229-051-P1-K1-D3
agcttacggacnccaacgtgcgacggtatatattttttgttttgtgacctaaattcaatt

SEQ ID NO: 2808 - DNA, 385 bp, Lilium asiatic
  unsure (1)..(385): unsure at all n locations
  Clone ID: LIB3229-051-P1-K1-D4
atctaaataagttcaacatgcatttctctaattcaggccttgaaaggtaacatccctaagagtttgcctttctttgcatccgnggcaagagctcttcgccctggcggagtcgtctgcacccaggcagagagcatatggttgcatatgcatataattgaagatatcgtctcagtatgccgtgagattttcgaaggctctgttaactatgcatggacaactgtacccacatatccaagtggggtgatgggtttcatgctttgctccacaaaggggccggcgggggattttcagcaccctgtttatcagatagaggaggataaggcattcacacagctactgcctttgaaatttacatctcagagattcactctgctgcattttgttt

SEQ ID NO: 2809 - DNA, 431 bp, Lilium asiatic
  Clone ID: LIB3229-051-P1-K1-D5
caacctacaactcgtgtatatgaagatgacactgcatatcaatgtgacatggagggtcgcagtatgagttttggcttgaagagaacaaataaggctcaacgtacaactcgtgtacatgaagacgagggcaccgagtataaatctgatatcgagggtcgcggtatgagtttcggctctaagaaaacgaagaaagttcagcccacaactcgtgtacatgaagatgaggacactgagtatcaatgtgatatcgagggccgtagtatgagttttggctcgaagaaaatgaagaaggttcaatgtacaactcgtgtacatgaagatgaggacactgagtatcaatgtgatatcgagggccgcagtatgagtattggctcgaagaaaacgaagaaggttcaacctacaactcgtgtacatgaagaggatgcagagta

SEQ ID NO: 2810 - DNA, 343 bp, Lilium asiatic
  unsure (1)..(343): unsure at all n locations
  Clone ID: LIB3229-051-P1-K1-D6
tgttgattctcttttgtgctatactatacgccggtacaagttggagttactagcagggaatgggcccacatgagaatctctggccgacaaaagcaaatctatcggtccaatttgtgcttatctatccaggccaagcaataaagcctccaaccgtggtacactntcccttgtcctaacaccgtctcacaggaaacccagtcgaccaactcatcgattgccttacccagtggttcgtgcacgttctccttaattggtagcccaacttttaacatcctcaatcaatgggtgtacccttttttggaaccctcaacatgaatccatgacgcccatctatattggactt

SEQ ID NO: 2811 - DNA, 418 bp, Lilium asiatic
  Clone ID: LIB3229-051-P1-K1-D9
aaaagaaattgaccaactgcattccaaaaataaagtggagaaaaaagaatttgacctaagaacaatcgctgtgccctgacttgtttttattaaataaaatggataagttgatcatccgtgtagattttcttgaaagaagacatgcacttggttgactggaagcatactgagtacacttactcgtacactttctggcgaataatcaccttggacgatgatgcatttgcagaggccagctttcgtcagataaattcttgaatggaattctgaagttttctggatttggaaatgcttgatacaatctttgaaaggggttggattggagacccaatggatctgcaagggttcttacagttatgttttgaatatattggcaagagtatctcctatcttcttgaattcataccctatatgctgg

SEQ ID NO: 2812 - DNA, 377 bp, Lilium asiatic
  Clone ID: LIB3229-051-P1-K1-E1
cggaggtgaacaagagtgtcaggatcttactgatgtaattttgaagccctatcacatggcttaacggggatataaaacaccaaacgttgagttgtacgaaccaactggttcacctggcttgaaagagcataagtgcatgctgcatagggatgctatataagcacttagatgccactaacgcatctcaagggtcagctagcaacgcctgaagaggtgcttctgtacgtatggcatgttgtatcatgtgtgggtgtagtccaaggttgctgggatacaacagatgtagggctggttttcggcaggatctgatcaaatattggtcttcggaaatttttccaaacttttcggaaatccaaatggcttttcaattccattcc

SEQ ID NO: 2813 - DNA, 373 bp, Lilium asiatic
  Clone ID: LIB3229-051-P1-K1-E10
gataataacttcaaattcaactccatcgtatacttgtacataattttaatcccgaaaacttacattaaagattattttattctcagttatcttacacacagagcaacacattacaaaataatattcaacacataacaacataatatcctaggggcccgcatcagggcctagacagtgctcactcgtggccggtagcggcggcgatcttggcggcctcgaggtcagcggccctcttgagaaagctatcttcatcgtcctcgagcgccatctggatgggggcggagccgagcccgtcagcgatggcgagcatgatccgccgcatctcggagcggaactcgtccctgtcgacggtgccgctgtggtcgaggtcgaa

SEQ ID NO: 2814 - DNA, 427 bp, Lilium asiatic
  Clone ID: LIB3229-051-P1-K1-E12
gtgttctagaaagggcaggttctagagagatcacggatactctagaggagcatggaagggtcatgagttgaagactggaggctataaatagaggagaaggacactctctcgcgcgtccggtgctcggggctcttagtttagctctctctcagttctttctcacataaggagattcgagaggttcgaatgaagtattgctagagtggtgaatgtgatgcaggaggtccgattctatggaggttaagaagccaagccgtgatcctgaagccacgaggtactagtctgagatgtctgctacttaaggtgagtccctaactcaatgtatacctcatgaatgatgtcatataatccttctcctattagagttttgattagtgagttctagattaggatgaacatggagttttaaattgtatgagtgttgagg

SEQ ID NO: 2815 - DNA, 350 bp, Lilium asiatic
  unsure (1)..(350): unsure at all n locations
  Clone ID: LIB3229-051-P1-K1-E2
tgaagaagtataaaaggtatgagaagaggcactccaacatccctgctcatgtatcgccctgctttcgtgtgaaagaaggagaccatgttatcattggccagtgcaggccattggcgaagacagtgaggttcaatgtgttgaaagtcattccagcaggatcgactggcggngctgggaagaaagcttttgctgcagtctgatgaagttaaagggaatttgcggtcacatggctgataatttgaggttttgctcttaatttaagagagaacaaagagaacaaggttgtttaattgttgtttcgacagtgttacttttcatctggtttgagtactagttgtccaatgaacatt

SEQ ID NO: 2816 - DNA, 397 bp, Lilium asiatic
  Clone ID: LIB3229-051-P1-K1-E3
tgaagaagtatcaaagttatgagatgatattctttaacatccctgctcatatatgggccctgttttcatgttaaagagtgaggccatgtaatcattggccaacgcatgccattggctaagacagtgaggttcaatgtgttgaaagtcattccagcatgatcgactggccgagctgtgaagaaagcttttgctgcagtctgatgaagttaaatggaatttgccgtcacattgctgataatttaaggttttgttcttaatttaagagagaacaaataaaacaaggtttgttaatttttgtttctacagatttacttttcatttggtttgagtactatttgtttcaattcacattaaaaaaaactaacaccgggttgcctttctatattatccaatctta

SEQ ID NO: 2817 - DNA, 428 bp, Lilium asiatic
  Clone ID: LIB3229-051-P1-K1-E4
ggcatacatgaagcggtatgtcaagcagttgacgcctaaacttgatgccgagcagcaggtgctatttaagaagcacattgagggggccattaagtttctgcttccgaagctcagtgatctgcaattttttgtgggtgagagcatgcaggatgacagtagccttgtgtttgcttattacaaggaaggtgctactgatccaacctttttgtacttcgcgtacggattgaaggagatcaagtgctagacttgaaaaatggcagcatatgggaaaaatagtttagtttactagtttgcttgttgtgctctatggatgttgtgatattatgcttggtttttatccgttactgtgtactggttcaataagaacttttttgtactgctgagattaagttttatttataatttggttttatgcgacatgtcaaaaa

SEQ ID NO: 2818 - DNA, 428 bp, Lilium asiatic
  Clone ID: LIB3229-051-P1-K1-E5
gcgacagtgccggagaaacaagttgcgatgatccatggatccagtttgcgtgaatcagcattgaccgaagtttatcacagcgcaacacgacgagagaaacatgattcctgattctgggcatgagatggatgctgttaccagattcttgatttactctcgtatttagcaggtttaccttttatattgactatacagcaaaacggggatcggagtattaactgagatgcctgagaagcagttcgaaagtgagtgagtttggtcgtgtttttttagtcgactacaatgctagatttacttgaacagattaaacccttagatgtatttttttgggtgttaagtaatttgtgtggcttaactttatattatctcgtacgttcacattgagtttagattacattatcccacagttaaatgttatatgttcaaaa

SEQ ID NO: 2819 - DNA, 302 bp, Lilium asiatic
  Clone ID: LIB3229-051-P1-K1-E6
ctgacgcttgatcggacgcgtgggttataatgggagctagaagatggggtcttggatgcggccaaggatttctgtagagacattccttccactagggtatgtggtcaagggtatgatgcggggaaaggcgtgtggataccttttggggtgggggagcaaggaagagggtagtatggatgtgatgtaacattgtcaggatctgtatagaccatgggcacacccaccttagtcaacattggagcaaaacctaatgaagcaaggggaagtaattgataaaatgcatgaagcgatcggtcttaaaa

SEQ ID NO: 2820 - DNA, 416 bp, Lilium asiatic
  Clone ID: LIB3229-051-P1-K1-E7
ctcgcccggagggcggcgcagaaggagcgagtccggatcctgtaccgccgagccctcaaggacaccctcaactgggccgtccaccgtcacatcttctacgaagatgtaaaccctaaccctaaccctagcccctctcccatttcactcaattgatcatctgatctagcatcgccatactgcatcgattctgagggagaaatttgatgcaaacaaacatttggaggatcctgacacaattgatcatgttattgcggaagcagaagcacactatgagaagttccggcaccctgatccctacattgttccctgggctcctggtggcagcaaatttacacgaaatccagcaccgccctcggggattgagatagtttacgactatggcaaagaggactgaagctgaaaaccgcacttaaaat

SEQ ID NO: 2821 - DNA, 407 bp, Lilium asiatic
  Clone ID: LIB3229-051-P1-K1-E9
ttcagattgaagacgaggaggtagagtgttgggttgtgaaagcaatcacttctaaacttctggactgtaagatggatcagatgaaccagattgtaattgtgagccgacacatggagcgcgtgtttgggatgtctcaatggcaaggtctccgtacaaagctggcggtttggaggggtaacattggaagtgcgattaccactattaaagcgaacaaagtatccgatgaaggctaacctgcatggcaaggtttgcgatccggtgattctgacttatagagagcactgaacattaaaagattcttttttgggggttgaggttccaaggacctttactatattgagtgtggatacatttaatgtggtttgggagaatgcaatgtccaattttttttaagatgggaccttatt

SEQ ID NO: 2822 - DNA, 426 bp, Lilium asiatic
  Clone ID: LIB3229-051-P1-K1-F11
gagatccaacaacctcgactggtacattggtcccaccctccttgaggcccttgacttgatcaatgagccaaagaggcccacagacaagcccctccgccttccccttcaggatgtgtacaagattggaggcattggaactgtgccagtcggccgtgtggagactggtattgtgaagcctggtatggtagtgacttttgggcctactggtctgaccactgaagttaagtctgttgagatgcaccatgaggctctccttgaagccctccctggtgacaatgtgggatttaatgtgaagaatgttgctgttaaggatcttaagcgtgggtttgttgcctcaaactccaaggatgaccctgccaaggaggcggccaacttcacttcccaggttatcatcatgaaccaccctggccagattggtaatggtta

SEQ ID NO: 2823 - DNA, 396 bp, Lilium asiatic
  unsure (1)..(396): unsure at all n locations
  Clone ID: LIB3229-051-P1-K1-F3
gaacacaccatccgaatgcctcttggtcctgattacaaccctgctatatcagtcggagcacttcttcgtccagaggttgtaaagaaagctggtgtaattattaatccaataaaatatgaggaggtgaaacctcaagagaaaggagttgagaccaagaggaatgggccaaaaccgagaatgaagaagggtaaagctgctgcggngaagaaaaagaattgacctgttaatctgaatttcactctggatggatttaacatctccagttgtagagatgcaatttgctagtaagtgcttgtagggtgccgaagctaattgagttgtatactcgtttgtgagccagactctntttggggcttatgctcacgttttgtatcattttagaagtttattgcctat

SEQ ID NO: 2824 - DNA, 311 bp, Lilium asiatic
  unsure (1)..(311): unsure at all n locations
  Clone ID: LIB3229-051-P1-K1-F4
gacgccatgactccagccgagatcacggactccctctccctccacagcatcaagaaccatgactggcacatacaagcatgctgcgctcttactggcgatggactgtacgatggcctgggatggatagctcagcgagtaactggccagcaaagtgcaacataaaactgcagagtcgatgtatgttttgtaacagtcgacatgtgtatgtgacggttctcggtcggggaagaaaactgttttgtgtgtataactcatctttgttagactcactactgttgagctaaattatggtaggggagatttacgccnna

SEQ ID NO: 2825 - DNA, 299 bp, Lilium asiatic
  Clone ID: LIB3229-051-P1-K1-F5
ggaggaactttgttcgatagaaagcctgttacaagggacttactgggggaggagctactaataggtgtatctcattataaatgaacatgtgtggatcggatcagatctaatttgacctgctcttgtggtttgatgttgaataaaatgctaatgtgcagtgaaatgttgcatggtgagatgagatgctttgtcctgtttcaagtaaagttaaaatatattgatttggacggcttatttacttcaaaaaaaaaaaaaggcggcgtctaagatcagcttactacctcatgcactatactttt

SEQ ID NO: 2826 - DNA, 412 bp, Lilium asiatic
  Clone ID: LIB3229-051-P1-K1-F7
ctttcatgaagaggaagaagtacaaaacatttgcattcaaactttcgaaaaaggctataggaaggatgttgagagaaaactctttaaaggggtgtatcatctttcaacacactagagggtgcacccacgcgtccgggcaaagcgggcacgggaggaggctggggatgagagggcagtgtcggttaagtcagaagcggagtccggtgagtcggcggaggctcagagctgggttctgtagaggctggccagagatgaataggtttggtctgtttatgtgttagtttatgaagtttttatggtaatttggttgtagtttggtctaaataatatcttagtagtaggttatcaaatggataactgatcttaaatgacatactctggtgaagaaaactttatggtgttgtcgtggaaa

SEQ ID NO: 2827 - DNA, 416 bp, Lilium asiatic
  Clone ID: LIB3229-051-P1-K1-F8
gaacgaggaagaggcaagtgacttcgataccggcgatgacgatgatgaggatgataactctgatgatgatgatgacacccctgctggaaaggataattctgtgaaaaggaagagagctagtaaggatgatgacagcgatgacgacagtggtgaggacgatgagaggccgccaaaacgataaaatgatggctagcatggaacagatctgggcactagggaattatgctttaggttaactcgtctttctttgtgttgtgggggcatgccttggacctcttacaagaggtaggaactctgatttatggggaagttggtcactccttccccaatggcagaggaatgtacctctttttttctatccttttttttcatttccttttttctgttaatgtgaactgaggtttgtgtatggatgg

SEQ ID NO: 2828 - DNA, 283 bp, Lilium asiatic
  Clone ID: LIB3229-051-P1-K1-F9
gttactaactaataaagttaccattagttataatattttatggctaaaaatacccgtataaaagctacaaatagatcataagtggtagttgagttctttagagaggtgatagtttcttgtatggagttaggttagagagagttgggatctcctttataatttataaaaaaatattgtagttttaccttgaagtacttgttatcgatctcataatttagttgtgatctcttcttattgttggtacgatttattgctactttactggttgttgcttaaagttctt

SEQ ID NO: 2829 - DNA, 444 bp, Lilium asiatic
  Clone ID: LIB3229-051-P1-K1-G1
gttcgagccacgcgtcaggctcatgatactatgagagctcgacaccaaacccaaatgtgcttgcgggggcgggggtaggtgggccaagcaacgccacagatgcttttccggactctcgagcggcgttccaacaatcggagccgactacttacattaacgcaccacttgtcggacttcttgcctactttgcagcccactcgtgatggtggtacattaatttggtggcggtgtggattaataattgcatttaatgtagtaatggaagctatgagccactacatgtcaagtgtgctttgtgaagcatgaggttcattgctattttagtcattcacgaagggatggtggtgcattaatttgcctgcggtggataatagtaatagcgggtggtgatgtgaattaatgattgccctacaatgtagttatggaagcaatgagccatcaatg

SEQ ID NO: 2830 - DNA, 173 bp, Lilium asiatic
  Clone ID: LIB3229-051-P1-K1-G10
ctctcgcagatatccctgttacgcacctcgactctcatgaaataagtgctttatgaccgagtgtctgctatgtgtatcagtacgaggagtgtcatgaaataaggactttatgtccgagtgtgtaacagtacgaggggtgtcatgaaatattatgtccgagtgtttgctattgt

SEQ ID NO: 2831 - DNA, 424 bp, Lilium asiatic
  unsure (1)..(424): unsure at all n locations
  Clone ID: LIB3229-051-P1-K1-G11
ggggaacgccgccgccgccgcgtcgaacttttactcggagctctctcctgtcgccatgggtatcgatctcgtcgccggcggccggagcaagaagacgaagcgcacggcgccgaggtccgacgatgtctacctcaagctcctcgtcaagctgtacaagtttctggtgcggaggacggggagcaagtttaacgcggtgattctgaagaggctcttcatgagcaaggcgaacaagccgccgatttctctcaagaggcttatcaatttcatgtctggcaagggtgatcagattgctgtgatcgtggggacggtgacggacgacaagagggtgtatgaggttccggcgatgaaggttactgcgctgaggtttaccgagactgctagggctaggattgtcaaggctggcggngaatgccttacctttgat

SEQ ID NO: 2832 - DNA, 256 bp, Lilium asiatic
  Clone ID: LIB3229-051-P1-K1-G12
cccacgcgtccggacatcttttatcactaaggattttttttatttttgtagtaagatcactgatcttctattttaatagtgatgtctgttttcaccatgctctatctcaggttttaattttaacaaatttctgcttttcaccctactctatctcatattttaattttagcactcttgatcgttgctttttcaaagatttatgctttaataatttcttttacgtttggcaaattatgatattaagtttttgtagccc

SEQ ID NO: 2833 - DNA, 237 bp, Lilium asiatic
  Clone ID: LIB3229-051-P1-K1-G4
cccacgcgtccgctaacgcatgccctgacacaattcaaactgaaaacgctgatgcatctgaacctactgctactactgatggaagcaatgcatccaacatacatacagacgcctcacaagatagcatcaacagtaatggtagcgacatcggacatgatcagttttatgtggatatgctgactgaatgcacgacgggttctacatctaatgctggaaatcaatggaatgcctgaaatc

SEQ ID NO: 2834 - DNA, 277 bp, Lilium asiatic
  Clone ID: LIB3229-051-P1-K1-G5
cccacgcatccgctaatgcagcccctatctcatttttataccaaaaccccccaggggccgagataatatctatgcgtgttgccaacaaacccaagcaacagacccacgacgcctcccatgataacttcaaaacccatgtcgacaacatccgaagctgtaaatactatcttaacatactaccggaagcaagattaacgcggtgattctgaagaggcaaatcatgaacaaaccgaaaaaacccccaagttctctcaagaggcttatcaatttcatgtct

SEQ ID NO: 2835 - DNA, 437 bp, Lilium asiatic
  Clone ID: LIB3229-051-P1-K1-G6
cagggaccacgatggagggctgtgatcgacaagatgaagcaaggtgcggccgagatcaagaggagtggagcagagcaggcgcaatcgacggccgtgatcaaagcgtcgatatcgagcagcaattcgatggccaagatggaggtgcaagcagagtgcatacgatcagggagcaatcagagtggtgcaagcaagaagcaagggctatgatgaaggaaggacaagcagatcaagatgtgagcggccgtgatggagctgcaagcagagggacggccaggattgaggaaggtcaagatgatccagtgaagaatcgacggcaatgatgcaactcgaaggcctataagaagggaggaagtccgagcagtaagttggttccttcgttctcggttgggttctcggattacttcccccgctgatacctcgatagagggatactggag

SEQ ID NO: 2836 - DNA, 388 bp, Lilium asiatic
  Clone ID: LIB3229-051-P1-K1-G7
atttcaagaatcttcccctttggacacattttgtgtctacggaggggtgcctatgcagcagcaaatgagagttcttcaatatggtgttgatgttgtagttggcactcctggcagagttattgatttgctcaatagaggttccttggttctgtctgaagtacagtttcttgtgcttgatgaagctgatcaaatgcttgctgtggggtttgccgaagatgtggagaaaatcttggataagcttgcacagaaaaaggcaaacatgatgttcttttcaaccatgccccctttgataagaagccttactaagcagcacctgaagaatccagttactattgaccttgtaggaaaaaatgatgaaaggttgcagaaagaatttctctttacttta

SEQ ID NO: 2837 - DNA, 419 bp, Lilium asiatic
  Clone ID: LIB3229-051-P1-K1-G8
ctttccaaagcttaatgcatgtcttaagcgagcttggaggagacacatgcggttcacaagcttaatgagcttttgggatcactcccaagcatatcttcagcaagccaggcagggtttctgcaggcttaatcggtgcaaaagaagaaacttacaggaaggagcaatgaatgcgactgcatgggcttcgacttcactggcttcggtatcgattggcgagactagttcaggaaggtcacactcagctgctgaaaggagatgagaaggtagggttgaattatcttaaacggaggtaaaatttgttttcagattaaagctgtatttggttgtatgattcctgatacagccggtaggaacgagattagccattgccggatttttcgtacctgtaagatttgcctctatatctattgtaccgaagc

SEQ ID NO: 2838 - DNA, 374 bp, Lilium asiatic
  Clone ID: LIB3229-051-P1-K1-G9
tttgtggtttggttttaagcgaagaggaaaacagtaattgcattaaacttcggaaaacaagttataaatatattaagaaaagcttacaacccgagcagacaaatattatagaagcatcaaacacatgaaagtagtccctcaatctctcttattacatcactcaaatcatattggaactaccctcatatcctccctgaacccccgagaaaggacgaacttttgagttcctcctcgatcggaagcatgcaagaacgatccctctcaaagccagaactcaacccctcaaccctttccgagcctctgacttgccggccccttgattgggcgcaccggactatgattcttcttaagcattggggtccttcttatagcca

SEQ ID NO: 2839 - DNA, 426 bp, Lilium asiatic
  Clone ID: LIB3229-051-P1-K1-H10
tcctcctcctctctctctcatctgagcggtgcgagatcagggcacccgcgccgtcgccagcaagctccgcctctccccgccgaccagagttgatggcaacatttgagctataccggagatctacaattggcatgtgcttgactgagaccctagatgagatggtttcaagtggaacactcagtccagaacttgctatccaagtccttgtgcagtttgataagtcaatgacagaggctttagagaaccaagtaaagagcaaagttactattaagggccacctgcacacctaccgcttctgcgacaacgtgtggaccttcatcttacaggatgcgaccttcaagaatgaagaatgccaggaaaatgttggaagggtgaagattgtcgcctgcgactccaaactgctccaacaaggataagtcattgatg

SEQ ID NO: 2840 - DNA, 427 bp, Lilium asiatic
  Clone ID: LIB3229-051-P1-K1-H11
tgaagatatattaagatttatttgtccgacaaataacacaaaaacaaataagtatcatatgagtcacataattggccaaccaaacataaatacaccgtgcgttttgataaatcatctcgggaaatttatttgtgtgattctttcggaaaatttatttgtgtgattctttacatgatcattgtgttctcatttcaaagatcggtaaacactaatgtttgaattcactttcgctcatatgaaaccttataaataaaactaattgtagcacattgtttttacatgtaattatagtagatatattgatgagatatcctgtcattgcaaatttttgatgacacttcaataattcagctggctaatactaaatatatgacacttatggcccttcagttagaatccatgcttggagaaactttattagaatatt

SEQ ID NO: 2841 - DNA, 365 bp, Lilium asiatic
  Clone ID: LIB3229-051-P1-K1-H2
gccatggatccggtcctccgccgccgcactcccctgatcctcctcatctccttcggccttctgatcgtttgcttggcaacggaggccgaggtcatcaccctcactccggagacctttactgacaaggtgaaggagaaagatactgtgtggtttgtgcagttctgtgttccttggtgcaagcactgcaagaacctgggaacactttgggaggacctgggaaaagctgtagaaggcgaagatgaaatagagataggacaagtggattgcagtgtaagcaagccagtatgctccaaagtcgacatacattcataccctacatttaagatattctatgatggagaagaattctcaaaatataaaaggcc

SEQ ID NO: 2842 - DNA, 241 bp, Lilium asiatic
  Clone ID: LIB3229-051-P1-K1-H3
gccaaagctgctcctgggaagaagcctaaaactgccgcagcagtggagaaagcgaagtagttattttctttccttttcttgtctctgtttaaggagtggtaggcagctgtaaattggcatcagcttggatattagtgtgttgtgtggtttttttggttaatggcaaggtgttgatgacaaaaggtgttattgtgtttaagctgatgacacctgtaccatatgcaatttaatttttttactg

SEQ ID NO: 2843 - DNA, 431 bp, Lilium asiatic
  Clone ID: LIB3229-051-P1-K1-H8
gccatggatccggtcctccgccgccgcactcccctgatcctcctcatctactgcgtggttctgatcgtttgcttggcaacggaggccgaggtcatcaccctcactccggagacctttactgacaaggtgaaggagaaagatactgtgtggtttgtgcagtactgtgtcccttggtccaccactgcaagaacctgggaacactttgggaggacctgggaaaagctgtagaaggcgaagatgaaatagagataggacaagtggattgcagtgtaagcaagccagtatgctccaaaggcgacaatacattcataccgcacacttgcgatattatatgattgataagaattctcaaaatataaaggcccgcgaaaagtcgagtctctaagggcatttgttcttgatgaggcagagaaagcggaacgaaagaagtt

SEQ ID NO: 2844 - DNA, 389 bp, Lilium asiatic
  Clone ID: LIB3229-052-P1-K1-A10
gaagcagtcaaaaagatttagatgttctcttattcgatatggcaactataatggggtccacggagaacttcacacttagtaacaaactcggagagggtggtttcgggcctgtttacaagggcaagcttggagacgggcaagaaatagcagtgaaaaggctcgcgaggacttcaacgcagggactcgatgaattcaagaacgaggttatattgatcgctaaacttcaacacaggaaccttgttcggcttctcggttgctgcattcacggagaagaaaagatgctagtctacgagttcatgcataaccgaagcttagacaccttcatattcgacgagacaaaaagagcgatgttgaattggcaaaggcggtttcacattatcttggggatc

SEQ ID NO: 2845 - DNA, 390 bp, Lilium asiatic
  Clone ID: LIB3229-052-P1-K1-A11
caatattggagagttcttacccaagttgcacacactgatccttacaaacaaccggctggtgaacttggtggagattgacccattggcatctttgccaaatctaaaggtccttagcttactagacaatagcattacgaaaaagccaaattatcgactatatgtgatacacagattgaaggggctgcggttgctggatttcaggaaagtaaaacataaggagagaattgaagcagaggagatgtttgcatcaaaagaagcagaagaggaagccaagaaagaacctgcaaagacatttacactagttgaggtggcagatgtgctggatacttcagaggaagagcaggctcctaaagttgttgtcccaactcaggagcaaattacggccatcaa

SEQ ID NO: 2846 - DNA, 202 bp, Lilium asiatic
  unsure (1)..(202): unsure at all n locations
  Clone ID: LIB3229-052-P1-K1-A12
ggggcgacccacgcgnccgcttcaatgaggttgtttatgtatagtttataacccatttagggcacacctgctgggtcagttacgcgtgttagttatctgcagctatctagctgacaaggtatttcatatccttccgcgtatatgtatattttgcggtgtagttcatgttgatatagtgtagtttttgctgtcctcgagctta

SEQ ID NO: 2847 - DNA, 172 bp, Lilium asiatic
  Clone ID: LIB3229-052-P1-K1-A2
ctcagtaattacatgatgtaaatttagggttaagtagattaaagatgataaacatggattatgttgtaatatccattttaagtagcagttctgtaatgtttagcttcatgaaagttgatgcttcagacaaatatttaatttcctccaataattaatagcattattatttaaa

SEQ ID NO: 2848 - DNA, 415 bp, Lilium asiatic
  unsure (1)..(415): unsure at all n locations
  Clone ID: LIB3229-052-P1-K1-A3
gggcggccccgcgtccggtttgtgaagggttctaggaagaaacattctaccaaagatctttgaagcaancgggggaacattattatcttggtgggcatcatcttcattttctactgcctcttcggctaacctagtcaactcttcttggatcatgactttgattgctgacttttcagacgttaaatccatctcgaagtatgcagcgagttctgcaacgatgtgcttgacagtgccagttttgaaatcaatgcgcttcagaatttcacatgtcatcttccttaactcttccttgcttggaccgcatccagatacagccttgactggcgatagttttacaccactagatttctggttaggtgcatcgacattgttcttcctactggagaagacctttgccccaacagtgttttcatca

SEQ ID NO: 2849 - DNA, 213 bp, Lilium asiatic
  Clone ID: LIB3229-052-P1-K1-A4
cccacgcgtccgcttttatttctttatagtttgatgttaggtactgttttcttgggaatctaaaagacttgttgatttagtcacattatcttatgttttgaaaggtgaattgttgaattgtttttatttgaggttttgttctatcaatattaggaactgcgatggagacattgtttactatcatctattatctaattgaatgagttgcacaac

SEQ ID NO: 2850 - DNA, 394 bp, Lilium asiatic
  Clone ID: LIB3229-052-P1-K1-A5
gccacgcgtgcgaaaatcccactttgattgcactttttggcgcaatcatgtcaatggagtcgacatgatatacggtgtgtgaacatgattacatcatccacaatagcaacaagcataccatctattaactttatataccccactatgaaggaacttctcaagagaagggctcttgaaccaaattatgagtgatacatacatatttatggactaaggtgcattaaaataaaatgcgagagtgtgcaaaaaatcaaagacagcacagactttcttaataatatatattatcctattcagtcatgcctcaacataagtcttgtattagcacaacaaaatgaaaatgactctccagaaccatacatcgaagagaatgaataaactcctgagggagaga

SEQ ID NO: 2851 - DNA, 428 bp, Lilium asiatic
  unsure (1)..(428): unsure at all n locations
  Clone ID: LIB3229-052-P1-K1-A6
cggggcgaggccacgcgtnccgctcattncccctgnncctcgccgacggcgatctggccaccgcttgtccgtacctcgccttgcgattttcacaaggtacagtgagcacggtaactgttgctatgtcagccttccggacatttnttgaaccagccctgtgggacccaaaacaactcatttctggggacctattgccaactggggatttgttgctgctggtttggcagatttgaagaaacctcccgaaatgatatctggcaacatgactgcagccatgtgtgtgtattcggggctcttcatgagatttgcatggatggttcagcctcggaactacttgctctttgcatgccacgtgtctaatgagtcggntcagctttatcatctaagtcgttgggcaaaatctcaaggatacctggagaagaaaaagg

SEQ ID NO: 2852 - DNA, 342 bp, Lilium asiatic
  Clone ID: LIB3229-052-P1-K1-A7
ggcttttctaaccattttcttcttcttcagctggttatgtggagcttcctgaggtgattcaagatgtgttttataatggccttgattaatgcttcgatctgggtagttgttggaaccttctggtggaaatttttgggtctgtattgagtctgtacgtaagttgagatagtccccatgtcttgaagggttagtgttctttttttccctcaaatcttcattttgttttatgacattcaaagttttggtaggggattggaactccgagttcatggtatcggtttcttatgcaatgattacatcagaacttggatttttaaaataaaaaaacttaaaaaacaaaaa

SEQ ID NO: 2853 - DNA, 277 bp, Lilium asiatic
  Clone ID: LIB3229-052-P1-K1-A8
cacgcgtccggaatgacctctctcattacctagatacaacaagattcacgacagttcacagggggagcggcaaaaatactgaagcattcttaaaattattccaaggtttgagcaaacaaaacaagcctatgcagaccatagttctttcgatcacataccataaagtgcctatgtctgttctagctgaggcgatcaatatccgaggcccttacatggacaaagcttacggcaccaagcagccaaccattactgtttttatgagaacgcctaaattcaa

SEQ ID NO: 2854 - DNA, 380 bp, Lilium asiatic
  Clone ID: LIB3229-052-P1-K1-B11
ggaagtgaagccaaagacagaaacagaggtggaagaaccttcagctgcagcttaggtctgatgaaacattccagttggttggtatactatttattttccctcagttgagcaccaaggtcagtaataatctgcagaaacttttcttgagtctggaattggattgaaatttgtgtggtggaaagtgacgctgagtcggttggtaaagtcagtccctttggtgggtatgggttttgttgttggattgggaggagatttctgcttttgtgcgaaggtagtagttttgttgggtgaacagtcctcgagttacttgtgtttaaagtttggatttgttattggtactgagtttggtttttgagtgtctttggcattgccactctggg

SEQ ID NO: 2855 - DNA, 398 bp, Lilium asiatic
  Clone ID: LIB3229-052-P1-K1-B3
cgaagtcctttcctccactgtgcacctgccattatgagatgtatatctgcccatgctggtgcaagaactgcatgatgtggccgaagttgatctatccgccgctatacatttgtcaggatctcattgtcaactactgcgatcacaactgtggcttgggaggcggagctgccacatctgagtaactagctgcgactatacgcagcagtttggccggtgaccatatggataagtgacggtctatctactaggagtggatagcctctcttccatcatttgcgtagtgctacgaataagtgtcaccctatctatgaagagcgtgtcgtggtggggatatctcccctccatttgctttttgtattaagtattatttcaatgttatctacttatctaagtttttg

SEQ ID NO: 2856 - DNA, 333 bp, Lilium asiatic
  unsure (1)..(333): unsure at all n locations
  Clone ID: LIB3229-052-P1-K1-B5
cccacgcgtncgcggacgcgtgggctcgaccgcacttctcctcctcctctccatctgaggatgatggacgccacgagggttcataaggagctgaaggaatgcaaccgcgacacggcggtctccggcgtcagcctcgagcctgccggcgccggcgccgccagcctctcccacttctccggcaccatctcgggccccgtcggcacgccctacgagggcggcaccttcaggatcgacatcaaactccctagtggttatccttttgaacctcctaaaatgcacttcgtgatgttttttttatcattttattaatataaagatgattgtgctatcttg

SEQ ID NO: 2857 - DNA, 390 bp, Lilium asiatic
  Clone ID: LIB3229-052-P1-K1-C10
cccacgcgtccgcccacgcgtccgagctctctgacgctcgatcgttgaacgatggcggagggaaagaagatcactctgaagagctccgatggtgaggaattcgaggtggaggagatagtggcgatggagtctcagacgatccgccacatgatcgaagacgattgcgccgagagcggcatccctctccccaacgtcaccgccaagatccttgccaaggtcatcgagtattgccgcaagcacgtcgagtccgccgccaagccctccaccaccgatgacaaggcgatcgaggacgagctcaaggcctgggacgctgattttgtcaaggttgaccagccgacgctcttcgatctcatcctggcagcaaactatctcaacatcaaaggtttgctg

SEQ ID NO: 2858 - DNA, 390 bp, Lilium asiatic
  Clone ID: LIB3229-052-P1-K1-C11
cccacgcgtccggcgcgatctgcaggaaccacatcatggatctctgcatcgagtgccaggccaatcaggcaagcgcgacaagtgaggagtgcacggtcgcctggggtgtatgcaatcatgcttttcacttccactgcatcagtaggtggctcaagactcgtcaagtgtgccctcttgacaatagcgagtgggagtttcaaaagtatgggcactagatgcttgatggggatggcggcagcgtgagtagatgcttattgtcagttgatggatagctccattcgttatgtcgccatatctcctctttatgtcaaacttttatttgaactgcatgttgtggctccttaatttagatctggtcatttaggactgatgtttctgaatttgttggtt

SEQ ID NO: 2859 - DNA, 399 bp, Lilium asiatic
  unsure (1)..(399): unsure at all n locations
  Clone ID: LIB3229-052-P1-K1-C2
cttcgatcttccgaacaatcgtgagctttacattcatcgaatcggtcnatctgggcgggttgggcgtaaggtgtgtggcgcataaattttgcgcgaaaagatgacataagaatattgagagacatcgagcagtattacagtacccagatcgatgaaatgccgatgaatgtggccgatcttatctaagcatgccaggtgaactatatggcttttgaagcccatgtgaactatatagcttttgaaggtgaaatttgcaaggaaaacaagtgacatgggaacagatagtgttgaaggcttgtattttcatatggggtattatttgtggatttttgttgttgttggggcttatttgcggattttctctgttatgactttcggagtatgtaaatgggttgcaaa

SEQ ID NO: 2860 - DNA, 313 bp, Lilium asiatic
  Clone ID: LIB3229-052-P1-K1-C4
gcgcatctctacatagatttatggagaagagaagagaaaggattaaatgttcaagagaaccatatcaaatgggcgaatctcggacgaattcgtcgtcaaagaagctggtgtcttggtttctcccgagctcgcggcccgaatcaaactcggttagcttcaaatgaatgagagaggtagggacatgtatccgatttggaaattaatattgatggaagcaacatattgtaccgggctaatgtaacttacaattcagtatttagaaatgacaaaaatcattgaggatttgtatttcgctgaagaattattaattttg

SEQ ID NO: 2861 - DNA, 458 bp, Lilium asiatic
  unsure (1)..(458): unsure at all n locations
  Clone ID: LIB3229-052-P1-K1-C5
ggngaatacagggantcatggttatagtggatatgtgtggggcacgaggcgctcttatggtgaagtgagggtggttatgtgtgcgtgttggtcggacagnggaagccggtccccacccaagcaaccctttcctggtagtgcaaggtagaacccaaggttctggtctcagagcttattatgggcgggtgagctaataggtgatgccgaaactggatagtgtggtgttattccaaaactacttcnnngagatcggacgcctnntctacagggagtggggttatgtgtgcccggtcagagtgagttgggcccttctctggtcggtccagcttggttacccggcagtgggttatgtgtggttggtcaagcctcaggccaggccacatgtagttgttcatatcaatgcctgcgagattccttcatattcttgacccttggctttgtttcttttccctttaact

SEQ ID NO: 2862 - DNA, 375 bp, Lilium asiatic
  Clone ID: LIB3229-052-P1-K1-C7
caaaaagtcctctggacttcctattattttcatttaccatttatgttgctccatgggtacttgttgcacctgcaggactatattgcttcatctatcgatggctagacctcgaagaacattttgttgtcgtcaacaagttgggtgtacttaccagctctccaagaagttacctatgtacccatgagaggtcgaatgagatttatccaacgtaggtcaacatattggggacatcatattaggtagatctctacccccaataatctcccacttggaatcaatgtgattcgatgataccaccaactcatcacagtcatctcactcaatgttggtgatcttcagtaacttaatagagacccactaaaagtgtgctcaact

SEQ ID NO: 2863 - DNA, 395 bp, Lilium asiatic
  Clone ID: LIB3229-052-P1-K1-C9
gccgcagccaaagtccggcatcttcgtcgggatcaacagcggccacatcgtcacgaagcgcgaactcgctcctcggccctccagcaggaaagggaaaacgagcaagagggtgcactttgtgaagaatttgatcagggaggtggctggatttgcgccgtatgagaagaggatcactgagctgcttaaggttggcaaggacaagcgggcgctcaaggtggcgaagagaaagctgggtactcacaagagggctaagaagaagagagaggagatggctaatgtcctcaggaagatgaggtctgctggagtgtccgataagaagaaatgatgaggagagactacttgtggactgctttcatatttcggttagcattatgtttctcttgaactgggaacct

SEQ ID NO: 2864 - DNA, 369 bp, Lilium asiatic
  Clone ID: LIB3229-052-P1-K1-D4
tgtccatctcccccaccgactcccaaagatccgcaccgcctcccgctcgcgcccttcggcgaaaccgtagctccgaccatggctttcgcggctcccgctggatcgctgccgccaccgtgccggagcgtcccgtcaacgatcccaccgggtcgacagttggaatttatggaccttcatctgattcatccaataaggctattgaacttggaattcaagattccggaaatggctcatcacttcaaaacagtggtggaattatgtctcagtggttaaccaccggccaagaagggggttcttctcaattgaagtcaggtcaatttgctcctgggcagacccatggagaaacatctggatggcaaattccatgca

SEQ ID NO: 2865 - DNA, 169 bp, Lilium asiatic
  Clone ID: LIB3229-052-P1-K1-D5
gggccgcataaccaaaaagggagggtgtggcccgcagcaactacaggttatatgtatcagactttgatacattagttgttgggttgatgttgtgttatgtggttttgtggtaagatttaaagactgaattaagtaattgtagtcggtttctatgtttgattttgatggg

SEQ ID NO: 2866 - DNA, 295 bp, Lilium asiatic
  Clone ID: LIB3229-052-P1-K1-D6
cggaggttggaattaagggttgattcttccacggtgttgcacgcgggttctgtccgtgttgcctttatcagtctatggttatgcagttacttcgttctctggtttggttaagttgggctgtggttcggttactgagtttagattcgttctgtgaacggcaaaaattatatggtgtggtttttgatctgatctaatacattttggattccccgcttcgtcgctcttctcccttcattgtcacttctaaaagagtaatgtttttagcggatcaattaacattaatattgtgttgatg

SEQ ID NO: 2867 - DNA, 394 bp, Lilium asiatic
  Clone ID: LIB3229-052-P1-K1-D8
cccacgcgtccgaaggtgcagagcgtcctcctctatgcctgccgcaactgcgatcatgaggaggttgcagacgacaatattgtctttaagatggagatacgccggcctgttaatggacatcccaatgtagcagctgatccctctcttcctcgtactaggaatgttacatgttcaaattgcaattatcaggaagctgtcttctatcaggcaccctgtgcaggagagcaaggattgacacttttcttcgcctgctgcaacccgagctgtggtcacaagtggagagattgaagcaatgtcttttgtgctaattctagctggaagtagaactgtgttaaggctgtgtttctggactatgtaataaaggatcgtgggagcttttctgtgtgaggcattg

SEQ ID NO: 2868 - DNA, 390 bp, Lilium asiatic
  Clone ID: LIB3229-052-P1-K1-D9
gctaatggcacagggtggtggcttttcaagacgaaatggaaaaggcggggaaagcatatatggtggaaacttcgaagatgaaaatttcttaatacaccatgatggtcctggtattctatcaatgggtaatgctggttctgactccaatggttctcaatttttcattactttcaaggccgctcctcaccttgatgggaagcatgttgcttttggaaagctcatttcagggcatgaaattttgaagaagatagagcgtgttgaaagtgataatgaaaagcctatttttcctgtgaaaatagtcaattgcggtgagctaagtgatcgacatcatggggtattagcacttgagaatgatagaaggaaaactactaaatcgaaatcagggaagca

SEQ ID NO: 2869 - DNA, 389 bp, Lilium asiatic
  Clone ID: LIB3229-052-P1-K1-E12
cccacgcgtccggatcaaagttgattatcaaaataggatattaatgaaatagcataattcctccataaaagagatagtggttaggtttatactaaataactccaagaaggggtagtagaccctcggtcatggtgtgattttttatccttagacttactgtcataaatcctctaaggagatagtgaagctataaatttcaccttataccttagcaattggtttttttactaaggtataccaagttgtgtaccatacctattatatatatatatgaatgataggtatcttttagtcgaacttaggtaatgttcactaaagtgaatattaaagtatcatcgggtaacctgagatatggttttagtatatttatcatgagatttgggattgat

SEQ ID NO: 2870 - DNA, 388 bp, Lilium asiatic
  Clone ID: LIB3229-052-P1-K1-E3
atttgatccaagtttttatttaattaattttggtcgggtgatatcagcattctgcgggacaatacgttcaaatgtattgattctagttctcaggaattaacctacccttactcttcttcgaggaattaacctacccttactcttcttcgaaattgattacagataccagtaagagacgaaaagcggtcgagttacattgtgttagggtgcaagttaaagagaccattccatctataaatactgagttgtcagcaccacagcttcaaaccctagagatacattgcgttagggtgcaagtaaaagagaccattccatctataaatactgagttctcaacaccccagcttcaaaccctagagatggcttgccagtcaaagaacagaagccc

SEQ ID NO: 2871 - DNA, 253 bp, Lilium asiatic
  unsure (1)..(253): unsure at all n locations
  Clone ID: LIB3229-052-P1-K1-E4
gggcggcccacgcgnccggtcatcttattagaattgcgggggagaataatcagntgtctaggttcaaganaagtggggtttcttggtatttgtggttaaaactatttacggcatttgtatctcctcaagctttgccttctgttggtatatgtatggtgttgtacacctgacattatattttgcttggattgcttgcttatcatccattgtatcggacacaattacatatgaatatattatgttttctttttat

SEQ ID NO: 2872 - DNA, 235 bp, Lilium asiatic
  Clone ID: LIB3229-052-P1-K1-F1
cggaggcatacttggttggtctgtttgaggacaccaacctgtgcgccatccatgccaggcgcgtcaccatcatgcccaaagacatccagcttgcccgccgcatccgtggcgagagggcttgaaatttctctgtctgttcctcctgtgggtttgcttgtggtggtttctactgtctcgtagaaagttgtaattcggcagtttatgcaatctaattgaagtttgttttcggcccttt

SEQ ID NO: 2873 - DNA, 402 bp, Lilium asiatic
  unsure (1)..(402): unsure at all n locations
  Clone ID: LIB3229-052-P1-K1-F11
ctgccatacantcccacattgnctgtcaagtttgnnctgagatcctgactaagagtgatagggacgatctggaaaggaaattgagaaggagccctaagtttcntgaagaatggtgatgctggcatgattaagatgattcccaccaagcctatggtagttgagactttctctgattatccaccccttggccgatttgctgttagggacatgcgccagactgttgctgttggagtcatcaagagtgtggagaagaaggatcctagtggtgccaaggttaccaagtctgctgtgaaaaagaaatgagggttctgttttcttaatagtagttaagcccagccaatttactgagtttattttgtacttgtcatgcgtcttgtttgtttcgtacttgccatgcgtctt

SEQ ID NO: 2874 - DNA, 343 bp, Lilium asiatic
  Clone ID: LIB3229-052-P1-K1-F12
cccacgcgtccgaaaggtttccatgttttccattatttcgttcataagaaaggggcattcaccacaaccaagtgagtcggaggaaagtttccgatttcttttcctatgcatatgtaaggatatcaattttggataaaccctggttattactgtatcctgaaaacctggtaaaaaggtaggtaaatcctggcaagaatgcatgtaattttattcgtggtctcttatacgactcatcaccaccctctgtataaaccaccacctcagctgctcagccccttcatcacacaactacaccttacagatggctgagaacaacaagccctccaccggcgtgcctcgtttc

SEQ ID NO: 2875 - DNA, 196 bp, Lilium asiatic
  unsure (1)..(196): unsure at all n locations
  Clone ID: LIB3229-052-P1-K1-F2
ctccgtaggattggcaagggacatggtgtgtggcattttgatcagacgcttctctgaggtatcaatggttttggatagtgttaacatttgagctggttgttgatcctatctctagtctgtctgcacgtctttttggatagtgtttgttgctagttaaccttggaggttagggatgttatatatctncctagtttgt

SEQ ID NO: 2876 - DNA, 376 bp, Lilium asiatic
  Clone ID: LIB3229-052-P1-K1-F3
aggttctggagctatttctgctaatgtagttgttgatgagagacaaatgaatgccttgttcctcgatgtggtacgagtgagcgagtcatatgggcttcgatttccacgggagtttgcaatcttgataaagcagcttctgtactttgatcggtacactcgcttgttagcacccaatatgaacatgctccaggatcaaaggatcagcatcgtgtcagatcgacggcgcagaagccagttaagttactaattccagatgatatagcatatatgcaccgagttggttaattttgtgcttgtaaataagtccccgcgacttaggggtataatagcatgtttataaacaacatcagccatgtttcatatttgtaaccatatt

SEQ ID NO: 2877 - DNA, 396 bp, Lilium asiatic
  Clone ID: LIB3229-052-P1-K1-F4
ccaacaccgccggcgctgccatggtgaagtactctagagatccctccaaccccacgaagtcatcgaaggcatgcggaaaggatctcagggttcacttcaagaacactcgtgagactgcatttgctctacgaaagatgcctttggccaaggctaaaaggtaccttgaggatgtcatggcacacaagcaggccataccattccggagatactgtggaggtgtaggccgtacaggccaagtgaaagctcgccactctaatggtcagggccgatggcctatgaagtctgcaaagttcattctggatttgctaaagaatgctgagagtaatgcagatatgaaaggcttggatgttgatgccctctacatatctcatattcaagtgaatcaggctcagaagc

SEQ ID NO: 2878 - DNA, 387 bp, Lilium asiatic
  Clone ID: LIB3229-052-P1-K1-F5
tggtttgttatactaatttcaatttattaatatcttatgtcatttcattgtgacgacggatcatcatccccttggtgtccaatatatccggaatccgcctagtatccattccataattttgaaatgagaattcccagtttcttcgtattttttctagtggcggttcaatcccgaccactaattaaacacctaaacactttgataccctccatgccggggtttgaatgcgaggcctctatagagtggcaccctttcgcccaacccacttaatcactgaggctacgcggccacctctaaaaaaaaattgtttgcttcatattctaaagcggtgcatggtctggattatttgtcgacatcaagatctgagatgcatttttcgaggagcct

SEQ ID NO: 2879 - DNA, 88 bp, Lilium asiatic
  Clone ID: LIB3229-052-P1-K1-F7
tatagaggatacaagcttacgtgcgcgtgcatgcgaggttataatattattatagcgagacctaaattcaatatactgggcggagata

SEQ ID NO: 2880 - DNA, 391 bp, Lilium asiatic
  Clone ID: LIB3229-052-P1-K1-F8
ggtccctaaagaaactgcaaggcgcacaactgatcctctctccgatctttctgcggttgagagaaacctgccatccacaactgggacgaaaaccacagcatctgggtgggcagcattttagggctgtagaagtacttaatatacacactgggatcctgttcgtataagggaatgaaatgtgagttcgggatcccaggtcttctttccctgcactgttgtatgtttatggtctttactcggatactctgaataatatttgatgggagcatgatttggttttttggtgttacatgaatgtacaattttaatatatggatataaatatgttgataacttttttttttcgtctcaaactatccgcgtgaatatgtaagcaatttcatgcttacct

SEQ ID NO: 2881 - DNA, 393 bp, Lilium asiatic
  Clone ID: LIB3229-052-P1-K1-G1
attggcctcaatacacccccatcacttcgaaggccgatcacgatctaatgctctttacggtatcaaagtcaactggacacgctgggacccggcttgggtgggctcttgtgaaagacagaagtgttgctaaaagaatgaccaagtttattgagttgaatacaattggagtatccaaagattcgcaggtccgagctgccaagattcttcgagtgatctctgatggttatgagctcgctgactccaggatctcggataggctctttgactatgggcggcttctcatggctgatagatgggagaggttgagggaagctgttaggaaggcgggcatctttagtctgcctcgattcccatctgacacctgcaacttcgccggggagtgggtaggaacat

SEQ ID NO: 2882 - DNA, 346 bp, Lilium asiatic
  Clone ID: LIB3229-052-P1-K1-G11
cgagaacaacacactcaggggcctcctcgcagagaatctcgcgctactccaagcgcctctcgaagagccccagcctgtcggatgattgcccgcctgatctatataagcggcttgtagcgacggtagatgactcaagtttcctaactaaactagaatcacttcgccaggagtcagcggtcgtagtaaatggaaacgtttcgtcgaccaaagcagcaggagatgtggatatcttgttaaatgatcatggggagcctagctggggggtcttggtttaacaagatgtaaatcctgacagcttggaggaagttagggaaattgataatgaaaataatattgtcattattga

SEQ ID NO: 2883 - DNA, 384 bp, Lilium asiatic
  unsure (1)..(384): unsure at all n locations
  Clone ID: LIB3229-052-P1-K1-G12
cggacgcgtgggtgctcatcaatcagaagttgaaggcagcgacatggatcagtctgaccagggttatggtggaaaaggaaacaagatccactattcagggccgctgttgcggccgtcgggaaatgtcgatcagatgctcaaggatcatgaccggcagatacaagaagtgttccgacggtctcggatggataaggcgaaagtgaagaaagccaaaggtgaaggaaatcagagcggagtgaagcctttggatctaggtgttgttcctgtataccccttcagccggnggtcggttcctgtctttacttcaagtcgtggagcagtgcagtagaacgcgttacgccggtgataatttaaggtgcgatatattgcaagggttggagagag

SEQ ID NO: 2884 - DNA, 249 bp, Lilium asiatic
  Clone ID: LIB3229-052-P1-K1-G4
tagatgtagttgtgaaatcagaaaagaggatgatagtatcatgtactctctcgcgtgtgtctgttggttgtgtttcatctctgtttatcggggattgttgcctgttatcctttcggtgtgattgggatccaagttctatatttagtcctgtttattattttgttatattttctgacattggaagtttagtgatgttcggagacatgaagttcttgtgattaatgacatggaaactttgccttttatgtt

SEQ ID NO: 2885 - DNA, 426 bp, Lilium asiatic
  unsure (1)..(426): unsure at all n locations
  Clone ID: LIB3229-052-P1-K1-G5
gaaannccgcgggcgacccacgcgtncgcggacgcgtgggtatacatgtgtggtgtttgtactgaattggaaacaccatgattggggggcgtcattctttctggcttgtccagtcttccgtgccttatcgcccactcaaattccttcccttcgtgataaagatcgccatgtgtggtcagcttcggcttagtctgatatttaaaaaaggcatcatggagaacctggtaatcgatatccatctttcccatcttcggttgcatgcgctctcgttgtttctgtttcaatttcttgctatccactttctcaatatatgcctgtcttatcttctctattccagttgcagcaatgaaatcaggaagttgaaaaggttgtttctcaatgccacgcttaccctgcagtatataaaataactatattaaatccaaa

SEQ ID NO: 2886 - DNA, 391 bp, Lilium asiatic
  Clone ID: LIB3229-052-P1-K1-G9
cggacgcgtgggcggacgcgtgggtgcttgtggagatggtctgctcaaagttcaggaggtccagcgtggtccaatgaaaagaattgcatgggatcacggcagcacgacttctccaaaagagattctggaattgctattcaatttcttaaaccagttcctgtcaggagcttataatgtgttgatgcagtctattcgaaatgatattcaaaaggagcatgaggccattcagagatctgatattgttgcttttttccaagttgctgattttgtaatagctttccagtatcagaagatctcagtttcaaagaaattgaatatggagtgtaatacaactgaagcttctcttgatcatggagttgataactccacctaccatggggatttttgtggc

SEQ ID NO: 2887 - DNA, 397 bp, Lilium asiatic
  Clone ID: LIB3229-052-P1-K1-H10
ctgaaatctccgagtcctctgttgttgcctactagagatgccgcgactccggtgggtgaatcagaagctgtggatgtggtgaaagatgtcttcgcatccgccactgaaagagatatatacactggagataaattagaagttgttatcatcaatgcatctggcattaggcgtgaattcattgagctaaggaaggactagatctagttttggagattcgatgggtttggggcttccagctgttcactttctatgtttcatggttacaccagcctctagacaatttgattaaagttactcatatacttgtttaagactcgtcaactccctttgtggcttgaaatttatctgggattgctttatgtcagtgcttgatttaaacatatatgtcagtggttaa

SEQ ID NO: 2888 - DNA, 345 bp, Lilium asiatic
  unsure (1)..(345): unsure at all n locations
  Clone ID: LIB3229-052-P1-K1-H12
gaanggccggggcgacccacgcgttcgctgagagggaaaggcacggccttctttgtttaatatgggatcaacacgtctgcgcgacctacatactctgcaaccgttggatcacaaaaccaagcatgctactcattctcgcatttctcctaaatgcctcactgctgaagagggactctggagtgttaagcaaaccgtggaacttaaggaccatatgttatgtcttcctcaactgcatcccgatttttgtcgtgcaaatggctatcgtttatgttggttccagattcaattctgataagagtgatgggggaacgaagatcgccaagtacttcacaagaatcctctctt

SEQ ID NO: 2889 - DNA, 448 bp, Lilium asiatic
  unsure (1)..(448): unsure at all n locations
  Clone ID: LIB3229-052-P1-K1-H2
cggaannncccggggcgacgccacgcccgtccggaggaacccactaagatggttctcggttcttgcacttgttnntcttggtggttgtgtgcctgggacgtcgaagggatgaacatgtggaggagaatcctgaggtctaccaaccctcagnnaacttcttcggtttcggcggtgtcaatcagtcctttttcntggctctagnnctttggcccggggttcnngggtttcgaggggtgccggcaacgtccccggcggcttccggcaggaaggaattaattgttggaggcccaaaactgttgaagcgataatctggtcggttgtttcagaagtgatgtaagggagttgagttctagtacagttattggggtgcagtgtgttattaggtcaagttagttccagtactcgatttatttggtgattcagggtttcagtgtgtgtttcaactgct

SEQ ID NO: 2890 - DNA, 402 bp, Lilium asiatic
  Clone ID: LIB3229-052-P1-K1-H4
aaacagagaaaaattgaatgtttcgaggaggagttggatacttctaggagggtgagggatgtcggagataattccggaaggggtttagaagcttgaatacatccaaaagggtcgcgagcagtcaagttgttgagagaaagggtttagatttgatgggtgtggtctataaaaaggaagcggtgttgatgaagtctctctcctccgaccttcagaggtctctcattcttaagaaactatgaatctctttctctttttgccgattggggtgtaaccgagagataaaggtgttgctgccatggagttcttgttcttacggagtgttgaagctatgtcctgaggtgttgatccggaagttcgaattgattctgtgatgaaagcgcatagttcttgatgtacttaaag

SEQ ID NO: 2891 - DNA, 125 bp, Lilium asiatic
  unsure (1)..(125): unsure at all n locations
  Clone ID: LIB3229-052-P1-K1-H7
gtgtacactagttgggtcattcaagtgttacagcctatagaagccttnttggagggaatgagaaatgagtacgagtgtctgtntaatgtgttgatgcatgggtcttacccattattggttttaaa

SEQ ID NO: 2892 - DNA, 358 bp, Lilium asiatic
  Clone ID: LIB3229-052-P1-K1-H8
cccacgcgtccgaagagagatgaaaacttctttcgtgatcttggtggtggttggtgtctctggccttctgatggaggacccggcgctgggggcgacatgcaaccccagggagctgagtccctgctcgggtgcgatgctgtacggggctgcaccagcaggtaactgctgcagtaagctgaaggagcggcagccctgtttctgcggttacatgaaggatccaagcctgagcgggtacgtgaactcggctaacagtaggaaagtggctgctgcatgtggactcaagaacccacattgctgatctgcatgcagttccaccctgcatagcatatgcagaacgtcgacaacccttgggctatat

SEQ ID NO: 2893 - DNA, 429 bp, Lilium asiatic
  Clone ID: LIB3229-053-P1-K1-A1
ccgagggattcccctttctcacaagtttattgatcgtccagatctgcgggatttctgatccagagggagagagatggggctgtcattctcgaggctcttcagccggctcttcgccaagaaggagatgcggatcctgatggtgggtctcgatgcggccggtaagaccaccattctctacaagctcaagctgggagagatcgtcactaccatccctactatcgggttcaatgtggagactgttgagtacaagaatatcagcttcactgtttgggacgttggtggtcaggacaagatccgcccattgtggaggcattacttccagaatacacagggactcatctttgtggtagatagcaatgacagggaccgtgtcgtcgaggctcgagatgaactgcacaggatgctgaatgaggatgaactgagggatgc

SEQ ID NO: 2894 - DNA, 422 bp, Lilium asiatic
  Clone ID: LIB3229-053-P1-K1-A10
tgcatatcggatcgggcttacagcatgtagcagatactcgtaaaggagaaggcggttctgaacaagcttgagtggaaccttacagttcccacagcatatgtattccttgtgcgtttcctgaaggctgcgaagagtgataaggagatggagcatatgactttcttctatgctgaattggctctgatgcaataccctattgtgttgtaccgcccgtctttggttgctgctgcagctgtctatgctgcccggtgtactctcaacaagagtcctctgtggactgagactctccagcgccattccggttatgctgaagcacagttgctcgattgtgcgcagattatgatgaacagtcattcggcggcaccggagagcaagctgaaagttgcctacaagaagtatagtagtgctctgtttggggctgt

SEQ ID NO: 2895 - DNA, 329 bp, Lilium asiatic
  Clone ID: LIB3229-053-P1-K1-A2
cggacgcgtgggcttttctttcccgttattttctatatttaaaattaaattttagcgttgagttaatggggatggggtagaggatcagttcatcgtctgtcacttgctactgctagtttgtcgccaatgctgttatcggtggcctaaataaggaagttgttttggatcagagatttcagtatgtcataactcatagttatattatttattaaaattattatattgataaaaaaaacaagacactacaaagaagtaaagaacaaaaaaaagaaaaaaaggcactcaaaaccagtatccagacaaaaatgaaaaataaataaactcaaaac

SEQ ID NO: 2896 - DNA, 425 bp, Lilium asiatic
  Clone ID: LIB3229-053-P1-K1-A3
gctttgcaactctcacttcagccgttcctctccgccgccgtcgccgtcgttcccgatctagcccttacaactatggcggagacgaagcaggccccgatcacgatccgaactcggaagttcatgaccaaccgcctcctctctcgcaagcaatttgtcatcgacgtgttacaccccggtagggcgaatgtctcgaaggcggagctgaaggggaagctggcctcgatctatgaggtgaaggacgctaacgcgatcttcgtgttcaagttccgcacgcacttcggagggggcaagtctactgggtttgggctcatctatgataatgttgagagtgccaagaagtatgagcccaagtaccggctcatcaggaatgggctggctactaaggttgagaagtcaagaaagcagatgaaggaaagaaagaaccg

SEQ ID NO: 2897 - DNA, 110 bp, Lilium asiatic
  Clone ID: LIB3229-053-P1-K1-B10
gtggttaaggtatatgtttggatggattttggtcaatgttttgatgaattgctgatatattctatggtgtttttggatatttcaactaggtgaaagttaatttggagttt

SEQ ID NO: 2898 - DNA, 425 bp, Lilium asiatic
  Clone ID: LIB3229-053-P1-K1-B11
ggaattcgtcatattgatgatgtcctctatgacctatatagctcgtgggattgcgcttcacaagatgacagagctgatactgttctcagtagtactgccaaaacattcttaagtacgccatccattatgaagaaacgtcatcgtgaaatgttatcacctatacaggaacacagaattgacaagaaatctggtactgtcaaagaccaccggctgcacagtacatcttctatgtaccagattgattgtggtcacatggatgatttagtcaatgacagcattgctcacagtgtttctgcttgttctataagcagggttttgtccccatctcatgatctgatagaaaaatctgatagctatattgaacaaaaagaaaacatggatcctgctcttgaaaactgcaaggtcgaaattgtagtttcaggaaa

SEQ ID NO: 2899 - DNA, 433 bp, Lilium asiatic
  Clone ID: LIB3229-053-P1-K1-B4
caacggatcttatcgaggagcattcaagaaaacataattgtgaggaatgacaacatagagcacccgagaagacgtgatgtgtgatcatgtgaacaaaacaaggagcatgaccttaacccaaaaggtacgtggaacatatgaagagagaagaagagagtgagcaatgtcaataatttaacaatgcttgcgctcaacaccaccgttcctcttatgggcatgcagacaaaattgttgaaaatgagtgccatgagaggtcaagtggcacacattgtggaggaaaggtactcatatgtataatcagattgaatgaccttgatttgagctcgaaattgagtgtgaatcataaaagtaaacgtctcatctatacgagggactttagagtgttgtcaaaacaaaaacacctatatatatatatatagaatgatcatatata

SEQ ID NO: 2900 - DNA, 212 bp, Lilium asiatic
  Clone ID: LIB3229-053-P1-K1-B5
attgctagaaaggagttttctgtttcggagacatgtctgtatatatggttttttatttgggctagtagggataatgagtttgtaagtgtgggttgtacttcggccctcctatgcaggtacctggttctgttttgcttcttgctttatttatggatctgagagtgactgttttatgtaaatgggtgctatattttggttctatattatttgtg

SEQ ID NO: 2901 - DNA, 422 bp, Lilium asiatic
  Clone ID: LIB3229-053-P1-K1-B6
cccacgcgtccggggttttgaattttgaaatcacatggatcccacctctgcaaccaccctagcgatgtatccagaatactctagatgtgttcgtgcgagggtaagaaggtagaattgtgtggattttttaggttcaatggcctataaattgaaggcaaatccagaggggagaagaagtctttagggagaagagaacttgagaaaggaggcttgacgaccctttgatttggagtttgcaagttccccggagcaagtttgcagttattcttctttcaatagtaagtagagttaggatttagtttatctttgagttgagtattgtaatagaatttttattttgttattgagatcaagtatttaagttcttttaatatactgttttgttatctttttagtctttattctatactcaatcttatagc

SEQ ID NO: 2902 - DNA, 432 bp, Lilium asiatic
  Clone ID: LIB3229-053-P1-K1-B8
cccacgcgtccggcgtgcagggatcagcataagaagctgtctgcgctggagatggagctggcggcggcgagacatgagggatttgtcggtaagtactcgtcggaggggaacgggaatgggactaggaagaagcttctggctgttattggagtggctaccgggtttggacggaagaacaatagggatgtgatccggaagtcgtggctttccaacggtttaaaaaagctggaagaagacaaagatgtcatagtacgatttgtgataggaagaagtgcaaaccgtggagacagtatggacagggatgttgatagtgaaaacaagcatacagaagacttcatgaatcttgataatcatattgaatctcctgaagaaagttcaaaaaaggtgaaacaatttcttattcatgctgcaaatacctgggatgctgaattt

SEQ ID NO: 2903 - DNA, 425 bp, Lilium asiatic
  Clone ID: LIB3229-053-P1-K1-B9
ggttttcattgtcctctcttgcttgatttctgtctccgtcaacttcagtacatgggtagtaatcggaaggacaggacctgtcacgtatcaagtcttgggtcatctgaaaacgtgtctggttctcggatttggttatgttttacttcatgatccgtttagctggagaaatatatttggaattctggttgcattagttggcatgattctgtattcttacttctgcacaattgacagccagcaaaaagctgctgaagtatctagtcagctttcacaggtgaaggaaaatgagtctgatccgctgcttggcgtggaaaatgggagtggtgtagtttctgatagtgttgttgccaaagcagcagtatggagctctgacaaagatctgcatgcttaaaattcactccaattttcatcccgtcattgagatt

SEQ ID NO: 2904 - DNA, 434 bp, Lilium asiatic
  unsure (1)..(434): unsure at all n locations
  Clone ID: LIB3229-053-P1-K1-C1
caagggctcgctgctgctttgcttcctcctcgttctcgtctccttctctcttatccaggccaaagcaaccaaggaaaggttgaaggaagttactcacaaagtctactttgatgttgagattgatgggaagcctgcaggtcgtattgtgatgggtctattcggcaaaactgtgcctaaaacagcagaaaacttccgagcactttgtacaggtgagaaaggtgtcggaaaaagtggcaaacctcttcactacaaggggagcacattccatagaatcattcccagctttatgctccagggtggcgatttcactcttggtgacggaaggngaggagagtcgatatacggtaccaaatttgaggacgagaacttcaagctcaagcacacagggcccaggattctctcgatggcaaacgctggtcgagataccaatggtt

SEQ ID NO: 2905 - DNA, 429 bp, Lilium asiatic
  Clone ID: LIB3229-053-P1-K1-C2
cccacgcgtccgcggacgcgtgggtttatactgatggccggatctccgttcaggggattgattctgtgttgtttccgcctgaagaggaggtgaaggcgtctgcggttcctccggctagcaagaagctggcaccggcgaagactgctactgccgccaagcctcgaagaggaaagttgcttgaagttgcttgcacgatgctgggtgggctgaatcagcgattccagtttaccacctgtcaatagagacaatggagaaggaaaccgatggtacatcacagtatggcgctgcaaaggttgatgtacaaaattcattggaagacattggaagacaatgtgttagatgttggaatctctctttattttgtttgttctttcatttgccccccttctcccttttagccttattcgtaaggttgatttcattgcaagg

SEQ ID NO: 2906 - DNA, 409 bp, Lilium asiatic
  Clone ID: LIB3229-053-P1-K1-C4
cccacgcgtccggtctcttattgagatgaaacatggaaggtcgttttttaggcgttcgagagggatagggaggggccgtgggagaggcggcagcagggggaggggaagaggaggcaggaagaatgaggacccaaagatgagcttccgagatttctgagctgttttggagattgtaacgacttatgtagatcattgatacacaaaagtacatgcatctccgtagatagacttgagttgggagtctacttgatgatcttgtagtcatcatatttgggagaaatttagacatgtgtagcttaaactaagttttatttcttgaatggaattatgtattatatactgttcaagaaaagagtataataaccttttttaaatgaaaaaatgggcggccggtctagaggatccaagc

SEQ ID NO: 2907 - DNA, 417 bp, Lilium asiatic
  Clone ID: LIB3229-053-P1-K1-C5
cccacgcgtccggtgaacaagtctcagtggtcaaggagtgtgtgtaaatagtcaagtgggtgaagatggtcaagacaatggatgataatgaacaaatgatcactggaggttatgaaggtggggtagatggcaaggttgtcacgacaatgagggtcaaagtgtcactgatgaggatgatcatggcggaagggtggatggtgagatgaaagaatgaagggcttattaagaaagcatcaaaaaatactctattttattaagtaatgacaatgtttatgataagacaagaaatgtctgtcaagagttatttttaggttatatggatgaatatatgatggaaaatgatgataattttatggaaaatatcttatttatatgcaagaatgtgcatataacaggataccttccataatattcacc

SEQ ID NO: 2908 - DNA, 393 bp, Lilium asiatic
  unsure (1)..(393): unsure at all n locations
  Clone ID: LIB3229-053-P1-K1-C6
gctgaggccaaagaggtacgggctcgagcacaagcagaacttctctggagagggagatgcatacatataccattccaagggtcacatgcttaatcctggacagagagactggacgcgctaccagccatgggagccggtagaggaaatcgaagcacaccctcagagcacccctaaggtttgaaantttacctccttgtgtgttatgttatctgtgtgagatcgtccttacccgcaattgttagacattatgtgatgattgtgggaataaaagtggtcgactggattctgttgagttgaagcagctagccttgctgaacctggaatgaatgtaaaaactaacatatnctgtaagcttttctgaacttgtgtcaatggtccttacttgcactaggg

SEQ ID NO: 2909 - DNA, 320 bp, Lilium asiatic
  Clone ID: LIB3229-053-P1-K1-C7
cccacgcgtccgcccacgcgttcgcatggcaaaaataacatagtattaaaaatggagaaagatactttaggagggggtcattgatgaccaaattcatcatataaaccctagtgatctaaagatcctttgggtagtacccctctatgatttgaggtattaaaatctatgcaaaagtactaagctggatcctaagattcgaggtaatgtattagctccacatgtatgttagggaaagatgaccatatttttatcagagtcaaagtataataacatttctaaaaagaaaatactcctagtaaaaaaaataatctttgacaaat

SEQ ID NO: 2910 - DNA, 418 bp, Lilium asiatic
  Clone ID: LIB3229-053-P1-K1-C8
cccacgcgtccgtgtcaaagttcgtgaacctctacaagtggccggactccaacatggacttcatcaacaccatcgccagagatcatcatcgtagcagcagtgccaggttggctccggccgtcgtggactaccgctcatgccggcagactttcacctccaaaagggagagcatcgctgagaggactgtgcggcgcctcaacagtctcaatcccaaaaagagcagccgcgacggtgacgggaagagcagtggcgatggttccgagagatgttgtttaatttgttgaagactgaggggggagatgtagtttgatttgttgaagactgaagatgagttagtttcagtaaacggtgtctcttactgtaagtttcatgcttcttttatttgtactttctatttcaaattacgagatgttatgtt

SEQ ID NO: 2911 - DNA, 332 bp, Lilium asiatic
  Clone ID: LIB3229-053-P1-K1-D1
cccacgcgtacggtcgtttgatcgaactgctaatggagactgcttatatacaacctcctgttaatcaatcagcagatgacccacctgatattcgccctgcatttgtacattcactcaaaaatgtcacagtggaacaacagaaacttgccaaacggtatggtgttattgaatgtgatccgcttgtccgtcaagggctagatagaactgcgaggcacatggttatgccttacatgccaatgttggttcctccactaaattggaccgggtacgacaaaggagcacatttgattttgccatcttacatcatgcgggactattgggcaaaacaacaa

SEQ ID NO: 2912 - DNA, 205 bp, Lilium asiatic
  unsure (1)..(205): unsure at all n locations
  Clone ID: LIB3229-053-P1-K1-D10
ccagcgnccgagagcngatgaccttncnatgnngagnnncacnggcgagcaaacaaancaagagggacgggggcacaggnaanaanaacaagagcaacngggcgcccaaggagaagcaggaaaacaacgagagcagagagacaggcaacaggggngccaggaaagggcgnggncnggncaacgcgcccaaagaaaacnccaccaa

SEQ ID NO: 2913 - DNA, 423 bp, Lilium asiatic
  Clone ID: LIB3229-053-P1-K1-D11
gatttggcatcacaccttctacaatgtgctccgtgtagccccggaagaacatggcgttcttctcacggaggcacctctcaaccctaaagccaacagggagaagatgacacagattatgtttgagaccttcaatgtgcctgctatgtatgtcgccatccaggctgtcctctccctttatgccagtggtcgtactacaggtattgtgctggattctggtgatggagtcagtcacaccgtcccaatctacgagggctacgcccttccgcatgccatactcaggcttgatctcgctggtagagacctcacagatgccttgatgaagatcctgaccgagaggggctactcattcacaaccacagcggagcgggaaatcgtgcgtgacatcaaggagaagcttgcctacgtggcccttgattatgagca

SEQ ID NO: 2914 - DNA, 435 bp, Lilium asiatic
  Clone ID: LIB3229-053-P1-K1-D3
cgtaaatcacatttttttataaaatttttcattgaaaaaatatacatggatatctggctgtgtaccataaacattcccagaatcaatatacaacttttttttgaatcaacaaaaaaaattatcaataaatacacttacaaccatgaaacaaatcaagaaaaaattgatgaaataaatccaaatagaatgaactttatttccactataaaaaagtgggtttcaaatactaatattagtaataaaaatttaaatagttatacttgcttgtcccaagcatatgtattttacaaattatcacaaacccaattacttaacaagtataacttgaaatatatatttcaagatcatgaaacccattattatattaaggatgacataaaggattattgtataacacgaggactatttgattacaaatcaaggcataataaaatt

SEQ ID NO: 2915 - DNA, 414 bp, Lilium asiatic
  unsure (1)..(414): unsure at all n locations
  Clone ID: LIB3229-053-P1-K1-D5
cgtnnccgggttaatctcgcggaaagccagcctctacatagtttatctaaccaagtcgactgaggagacgtggggtgcgtcgagattcaccgccgaggaatgacggttgcattctatgaataccagngcaagagcctctcaggcaaaacgggtctgcctacccagtatatcggccctcgtcctatgagttgggatgaggactggcaaccccttatcgacgattcctgtctccctgagacccgagagaggatctatctatgaaaaggggaccgctttccgaccatcaacttccgatgagattaaatgangaatcggaaggctcaatcataatgggaaagggctcttgatgcgcagaactctttccagagacacttgttagaactttgttttgaagggaggatcattccatctatg

SEQ ID NO: 2916 - DNA, 264 bp, Lilium asiatic
  Clone ID: LIB3229-053-P1-K1-D6
gaaatgtaccatggatttaacggcggggtccaccatatcgggtcatacactatgttggacaagagaaaatagatgatgtaatactaaaaatttgtgatcaaggcgtatagataattcagtcaaaaaatcgtaggtttatatcaattctgtataagggtttagtttaaaaatataacagtaggaaagtttcataatctaccgttggttactaatgtatatcattagatataaattttatttattgaaaaaactataaaatatctg

SEQ ID NO: 2917 - DNA, 428 bp, Lilium asiatic
  Clone ID: LIB3229-053-P1-K1-D8
atcttttttgctgtccggtggagcaggtggctcatcctattcatgaccagtcatgctacttgactgttgagcacaaaaagaagctgaaagaggaatttggggttgaaccttggacttttgagcaaaatcttggcgaggctgtcttcatcccagctggatgtccacatcaagttagaaatctaaagtcctgcataaaggttgcacttgacttcgtctctcccgagaactttcgggagtgtatccggttgacaggagaatttcgtttactgccccctgatcacaaggccaaggatgataaattggaggtgaagaaaatggctcttcatgcaatccgcgaagctgtaaaggttttgaaagggcctcgagcacatgactgaatcagagtaagctgcctgatatcctgcattattttactgatgttaagagcg

SEQ ID NO: 2918 - DNA, 397 bp, Lilium asiatic
  unsure (1)..(397): unsure at all n locations
  Clone ID: LIB3229-053-P1-K1-D9
gggttggggtcttccccccactgctcatcttggccctgccggttactggagttgggcgtagcatctggcttagagaacgaagggtcctgccgacgaaactggcctcaaagctctctttgcaagccacacatagggaatcgtccacgaagggtcggagcgctttctctctataaatggagggagctcgttcactaagatctctcaacccatagccagtagcttcccgctgccattagtcgaaagaggagtaggttgactatagcagcagtggtagccattaagagttggtttgcacgaccactacaccaatagaatgaaagcagggatccctgngaggagtgctacatgtctcacccaacaagcaaagcggaggcgggaacttcaacaagaatgggtt

SEQ ID NO: 2919 - DNA, 354 bp, Lilium asiatic
  unsure (1)..(354): unsure at all n locations
  Clone ID: LIB3229-053-P1-K1-E1
cgcggtacgcgtggggtntgtatttnggatgcaaaatacgggaggaaatcaagtattttaaggtgcaggaggaaaaaataaaaagggggaagaggaaaaaaaaaaaaaaaataaaaaaagaaaaaaaaaagaaaaaaataggagcggacgttataaaaggacacaagctttaaataacacaatacatacaaacaaaaaaaaatgttaaaaaatggggcggccgtttaaaaggaccaaaccttagtgacccctgcatgaaactgaaaaactcttatattgggccaccaaaattaaatttacgggccgtcgttttaaaaccaggtgacggaaaaaaccagggggcacccaaaataa

SEQ ID NO: 2920 - DNA, 380 bp, Lilium asiatic
  Clone ID: LIB3229-053-P1-K1-E10
ggcgagagtactcttcgatgtcatgacagagacacatatatccgaattttgaaaactgtgaaaccacctaatgatcccgaccgccgatacttctccttcttcacctacctgcttgcatctcctgttttcatgcagggagacttgtttttctccgaactcgacagtttcctcaaatgcatgcatggggaacttgttcttgatgtcggagtctgactaacaagttgaagcaatcgagcagcaaagatgagtgtaagagaacttttttgcaaaaatatatttgacaatcattgtatctttgtaccttgtgttgggttagtattgtaattgtagcagtcagttactaattatattgttgttctgaatgttatcttgtagttgtc

SEQ ID NO: 2921 - DNA, 350 bp, Lilium asiatic
  unsure (1)..(350): unsure at all n locations
  Clone ID: LIB3229-053-P1-K1-E11
ggcacgagtactctncgatgtttttataaatacacatatatcccaattgggaaggctgtgaaatcagggggggggcccgaacgccgatacttctccttcttcacctacctgcttgcatctactgtttacatacagggagactagatattctacgaactcgacagtttcctcaaatgcatgcatggagaactagtaattgatgtcggagtctgactaacaagatgaagcattcgagcagcaaagatgaatgtaagagaacttttttgcaaaaatatatatgacatatattggatgaaagtacctagtgttgggttagaattgtaattgtagctgtaagttactaattatat

SEQ ID NO: 2922 - DNA, 333 bp, Lilium asiatic
  Clone ID: LIB3229-053-P1-K1-E12
cccacgcgtccgcccacgcgtccggaacatttgaacaatgctggcaaattcagggcagttaagataggtccggtgccatttcatgaagtagacgaagactaacttgcaaaggcaacagcaaataagagtaaacataagatgttgtattgacatctgtagcgaatgaaggatcagtagtttttatgtccggaaatatggtgggcaaaagatttcaatgtatttcagctatgtaaacaaatggggatacttgtaaacatattgtccattaatgatgctctatcaatgaaagaaactatcaatttctctgcttcaaaaaaaaaaagagaataaaag

SEQ ID NO: 2923 - DNA, 99 bp, Lilium asiatic
  unsure (1)..(99): unsure at all n locations
  Clone ID: LIB3229-053-P1-K1-E2
gccacgcccacggaagcacacccacattcattaacaaaaccgccanaaacaacgggagggagacaaaaaccaaggcaagggacacaaacaaaaaccagc

SEQ ID NO: 2924 - DNA, 212 bp, Lilium asiatic
  Clone ID: LIB3229-053-P1-K1-E3
attgctagaaaggagttttctgtttcgtagacatgtctgtatatatggttttttattttggctagtagggataatgagtttgtaagtgtgggttgtacttcggccctcctatgcaggtacctggttctgttttgcttcttgctttatttatggatctgagagtgactgttttatgtaaatgggtgctatattttggttctatattatttgtg

SEQ ID NO: 2925 - DNA, 399 bp, Lilium asiatic
  Clone ID: LIB3229-053-P1-K1-E4
cccacgcgtccgcccacgcgtccggccctggtgactatcacctcgtaccggtatctctggactagtgctgttgcgggagagctcgccacgcttgcattctatattttcaccggctacaagttccgtcccgagactcataatccgtactttgttattgatgacgaggaggaggatgcggcggccgaggcgctcaagcttgaggatgagttcgagttgtgaaggtgaaactatttttagttttgtgccaaagagactgcgaagtggaagtgagatcctatctttgtggtttgattttctacgtagtttacttaatgagtaccaagtggatccttactgtgctattttgtctaccatgtatttttttttatttttctactgagacatttgctctttttttgt

SEQ ID NO: 2926 - DNA, 432 bp, Lilium asiatic
  Clone ID: LIB3229-053-P1-K1-E5
aaaaacataaaggtcaaggtttattatggtgactcttttggtttatatattaggtggataatactatggagtggtcaggatacttcagatgtatctcccttgatcaaaatttaactcatgcgagtaattccctttaatggtgatcaaagaagaaaaatgcttcttttgtgacttcagtttatatttcattgtgtatttactagcacttaatatgactatttatgtaggtcatcatgttaagaatgatataaagataatatacaacaatatgactataggagaatacaaagacatagaaagaagatttgggatgatggaaattaaaagcataacaaagtaaataggagaaaagaagtcaaaatttatattaaaactacccattaatttgataaaattttaaagactctataagatgatccatacaaataatat

SEQ ID NO: 2927 - DNA, 248 bp, Lilium asiatic
  Clone ID: LIB3229-053-P1-K1-E6
ccagcgtccgctgaagcaactcgtatacacagaagacatggtgtacaaattttgagaggcattgttgatgtgcgacggaggttcctcctcatatgagtgacttatggctttcttacaaacaatccaataaccaagtctttttttcaatgtttagaacgataccaagggaactcaaaaataagtatcgcagagaaatgtctgatgcatctatacaacattcgttcggggttcaatctatggatctttct

SEQ ID NO: 2928 - DNA, 246 bp, Lilium asiatic
  Clone ID: LIB3229-053-P1-K1-E8
gcatgattgcggcgttttggtttgttatgtattgcggcgttttggtttgttatgttattgggttttgagtctgctggttttgattttgattacaattgcactattttgtttaattagggatgtttcctatctttactcttattatgcggattctgtcgattttagtatttagtgttctatgtgtttgttgttctgaactggtttacagcaaatatttggcattttagtaatattgccattttctct

SEQ ID NO: 2929 - DNA, 418 bp, Lilium asiatic
  Clone ID: LIB3229-053-P1-K1-E9
cggacgcgtgggtttttatataacttttatttcggtgtcgtgtctttcattttgacattgagttcagtgttcatttcggcatggtttgtattgagtttagtcatcattttgatgttgtgtcagtctatttagctttcatttatgtgtcatatctttcattcggtattgtttccgtttcatttccattttcattaacaatttttttaaataatatatatatatatataatagaaagaaaaatccttcactctttcactatgataaatcatcaatctagcgagtatcatatctgacaatctaacataatgctctctgaatagggagtcaagtaaagttgtcagatccactatcactccacatcaggtgtgagttctacaccccgtaatcattcacttgatagttcaagtgagtaactcac

SEQ ID NO: 2930 - DNA, 367 bp, Lilium asiatic
  Clone ID: LIB3229-053-P1-K1-F11
cggggcgacctacacgtccgggcaagagtactcttttatgttttttttattacacatatatccgaatcaggaaggctgtttaaccacgtggtgaggccgaccacctatacttctccttcttcacctacctgcttgcatctcctgtttatatgcatggagactagtttttatatgatctctacagtttccttaaatgcatgcatggagaacttgttcttgatgtctgagtctgactaacaagttgtatcaatctagcataaaagatgagtgttagagaactttttagcaaaaatatatttgacaattcattgtatctttgtacctcgtgttgcgttattattgtaattgtatcagacagttactaatt

SEQ ID NO: 2931 - DNA, 429 bp, Lilium asiatic
  unsure (1)..(429): unsure at all n locations
  Clone ID: LIB3229-053-P1-K1-F12
atgcctngntgcctgttaaccagtgttttgaaactttggaagatttcgatgatgaggtgcagcatgtgagccgggggaaaagtaatgttcggacaggtggatcgaacccaatcaagatctctcaaatggttgttgctacaaaagcaaaaaaacctaagtttgtgtccggtgatgacgacttacccaagagggatgatattggggagaggaggaggaaacatgagcttcgtgtcttggctggagctggtgctggtgctgagtccatggatattaatgcccaagaagacggtgaagcgcaagactctgaagatgagttgtataaagaagcgaagaagcatcggagggtcactgcccaagatgatgatgatgaaaccgaagatgctgaaaacgagttctataaacaagtgaagaaacagcgaaaagagaagc

SEQ ID NO: 2932 - DNA, 239 bp, Lilium asiatic
  Clone ID: LIB3229-053-P1-K1-F3
cccacgcgtccgaacaaaatggaggaattgagaaagctggtggatcctattgaaagtcgtttcaaagatgaagaagctagagctcaagctactagggagtttctgaattgcattgtcgagtacaggatggctgtacagtctatgcctacatacgaacgccatgctttcataaaccagtgcaataaagcggagcattggctgcgggatatattccaacaacaggagttcttacccaagaa

SEQ ID NO: 2933 - DNA, 62 bp, Lilium asiatic
  Clone ID: LIB3229-053-P1-K1-F4
cccacgcgaccgcacaaacaccaagaatccaaaaagcccgcggcgaccacacgggggggggc

SEQ ID NO: 2934 - DNA, 412 bp, Lilium asiatic
  Clone ID: LIB3229-053-P1-K1-F5
cggacgcgtgggctcgaaatcccgcattctctctctccggcggcgaagcgaaggagaggagcatcccggtccgctgctgcacctgtggaaaggtgatcggtaacaaatgggacacgtatctcgatctcctccaagcggattacactgagggggatgctctggatgctcttggcctggttcgctactgctgcaggcgaatgctcatgactcatgttgaccttattgagaagcttctgaactacaacacccttgagaaaacggaggcgatgatgagttgaggggcaatggagatcccatctactgaagtttgtcatggcaggttgttagctatctatttagtgtcaactgttttgtggtgtgaagacattataatgaaacttctggtggcttgtgggtcagaatgtatgtgaac

SEQ ID NO: 2935 - DNA, 168 bp, Lilium asiatic
  Clone ID: LIB3229-053-P1-K1-F7
taaatagatagcgtccgttctttattttccatcctaacatacccatgcgtgcggggaaatatataatttatgggggcactaaaataaaattaactgaccgtcttttaacaaacatctttctgaaaaaaaataccctttacttaactaaattaattttcttaaaataca

SEQ ID NO: 2936 - DNA, 122 bp, Lilium asiatic
  unsure (1)..(122): unsure at all n locations
  Clone ID: LIB3229-053-P1-K1-G1
cgccgcctgaggcaagagagatccagcgagagatctgagctcggncgcccgaagaggagggcgaagnggaagaagaagaggangaggaggcngaagaggaagcgccgaaagaagaggcagcg

SEQ ID NO: 2937 - DNA, 431 bp, Lilium asiatic
  Clone ID: LIB3229-053-P1-K1-G10
cccacgcgtccggggagatggaggttgctgctcgaatgaaggccgaagccgatttgcaagctcggagggaagcggctcggttggcactgcagaagatggagcaaacagttcatatcaacgaagacaacattatgacatttagagagcttgaagctctggcttgtgctcgatcccccgatggaagtgtggtgcagctgcaattttgctatggaaggagaccactggaacagttgggattgttctttaaggaggatttcttggatgaggatgacactcttcgaccgcaggcggacaatgtgtcactgttgggtctctttctgaaggaagatgagggtatggaggccgaggattggttgtcgcctggtgatgccagtggggttgaggagggggagatgacgacgaggttagaggagggggagttgatggtgaat

SEQ ID NO: 2938 - DNA, 373 bp, Lilium asiatic
  Clone ID: LIB3229-053-P1-K1-G11
cgaaggccgagaagaagcccgtcgtttttaagccagcggcaacgccgcccgcggaggaggagaagccggcggttcgcaccgccatctgagaagaagccggcggagaagaagccgaaggccggcaagaagctgccggtcttcaaggagggggacgcgaataagaagaagaaggcgaagaagtcgatcgagacctataagatctacatcttcaaggttctcaagcaggtccaccctgacataggcatcttcagcaaggcgatggggataatgaacagcttcatcaacgacatctttgagaagctcgcccaggagtccgtccgtcttgcccgctacaacaagaagccgactatcaccttccgtgagatccagacct

SEQ ID NO: 2939 - DNA, 313 bp, Lilium asiatic
  Clone ID: LIB3229-053-P1-K1-G3
tgctcaggacttcaagaccgacctctttttccagagttcggcggtgtcggcgctgcaggaggcggcagaggcatacctggttggtttgtttgaggacaccaacctttgcgctattcatgctaagagggttacaatcatgcccaaggatatccagcttgctcgacgcatccgcggtgaacgtgcctgaaattctccttgttggtgtttctttgctgtagactttggagttttattttagtagtttgctttgatgtgagccttattcagaacatggaagtgccttctctatttaatttaaatgttgggtttcatt

SEQ ID NO: 2940 - DNA, 428 bp, Lilium asiatic
  Clone ID: LIB3229-053-P1-K1-G9
ggattgttatgtgtaggattttggaaaagctcagatttgtgtggcaaaatgaggaaaggatcaaagctcaagaaggaaaagagatgttgcaagcttgatgaggatgtgctctcggatctataagtacccctcctcccccattggattgggggtaagaggtctcactccggcccgagtgggggagggcacattgttagccatctttctctcggttttggaggaggcacattgggagagcatatacaagtgatttcggagtggagagttcatcatggttcttgtttgtgggtctttgttgagttttgagagagtcatgtaagtggagtttgtaaggtttgagtcttattttatgatgagtttttggttcggatttgtatacattcaaggatggccaaggcctagaatgggatttgagttcttgtgttgat

SEQ ID NO: 2941 - DNA, 408 bp, Lilium asiatic
  Clone ID: LIB3229-053-P1-K1-H10
cccacgcggacggaacgagggaggtttttgcgagaaagaacgccgaagccgaggggcaagctagaagggaagcgggacggccggcaccgcacacgatggagcaaacagatcatatcaacgaacacaacattatgacatcgagagagcgtgaagctcaggcttgagctcgatcccacgatggaagcgcactgcaactacaatattgctatggaaggagaccactgcaacagtggagattgtactttaaggaggataccgtggataaggaagacactctccgaccgcaggaggacaacgagtcacagtggggtcaatatatgaacgaagatgagggaatggaggccaaagaaagggtgaagcctggagacgccaaggcagcagaggaggagaagcataccaccaggttac

SEQ ID NO: 2942 - DNA, 110 bp, Lilium asiatic
  unsure (1)..(110): unsure at all n locations
  Clone ID: LIB3229-053-P1-K1-H11
gacaccaagaaagcggacaccaaaaacaagaacaaggccaacaacacgaacgagaccgacaagaacaacancgccaaggaacgcaaccacggccacccngacaaaggcaa

SEQ ID NO: 2943 - DNA, 283 bp, Lilium asiatic
  Clone ID: LIB3229-053-P1-K1-H12
cccacgcctacaataagaccctttctatctatacaatgaaaacccccccccctggggaagataaaacattttttcgcccttcatataacacaaaaccttttactaaaaatccatatccccacaaccacctttctttcatcaagatagcctacaccattaacaacatcaccgccaccaaatctaactagacctatactatctacatcttaaaacatctcaaccacttccaccctaacattaacatctccaacaagaccatttatataatgcacaacttcatcaa

SEQ ID NO: 2944 - DNA, 191 bp, Lilium asiatic
  unsure (1)..(191): unsure at all n locations
  Clone ID: LIB3229-053-P1-K1-H3
aagaccaaggccgagaaagagaaaagagacattgagaagaacacccaaaaaaggggagggaaacaaacaagaagggaaggcaccnaaagnccaaaaaaaaaaaacaaaaaaaaaaaaaaaaaaaaaaaaaaaacacaancacgaagaaaaaaaaacaaaaaaaaagggccggccccccaaaaaaaaccaaa

SEQ ID NO: 2945 - DNA, 420 bp, Lilium asiatic
  Clone ID: LIB3229-053-P1-K1-H7
gaatgacttcaaaaagatggtgagcatagacaaatcttcagaatccgatgctgcggctgcccttctcaagggggggcaaaaggaacaggaggtagaaaagaaggctagggagcagtttaaaggattatttgacaagaaacctggtgacattgccgatgttggaactgagtccacagagcctgaagttccagttgaacagaataacaaagatgaagatgaggagcaaaccgaaacacagtcgaattcagatggagatgatcgggaaagggaacccgatcgagtaggattcctgggacaactctggcccttcggtagaagaatcttcactgctatgggactgaataaatgctcaattttatgaccaaagttaactcacattcacacaaatattggtaattatcacatatttttcaacattat

SEQ ID NO: 2946 - DNA, 213 bp, Lilium asiatic
  Clone ID: LIB3229-053-P1-K1-H9
cccacgcgatctgtaggatggaggcctatctcacatttggggggcaaactgaggggcggatcaaagcttaagacggcaaagagatgctgcacgctttgtgcggatgagctctcggatctataaagacccctacttcttcattacattgggagcacattgcatcacttcattcccagttttgtactgcacattggcaagccatcttctctcgac

SEQ ID NO: 2947 - DNA, 265 bp, Lilium asiatic
  unsure (1)..(265): unsure at all n locations
  Clone ID: LIB3229-054-P1-K1-A1
gtcggccccgcgtncgccgcaccttggccgntttttacattcttaaggtatccacgctgcatctggtcctgcgtcttcgcggtgggctgtgagttggtttcgtcctttgttctgtgttactcgtttgatggtggcagttggtttggtatggtgtaggtgtgtcgtgatctagttatcgtgtgtctgtggactgctaggccttgatggcttttatctttactttctctatgccgttctaataaatcgtattaataatcttactaat

SEQ ID NO: 2948 - DNA, 320 bp, Lilium asiatic
  unsure (1)..(320): unsure at all n locations
  Clone ID: LIB3229-054-P1-K1-A10
gccacccaggaattgctcatgtttcaatctcaaatctgtctggatcaaacgtttggaaatccctttaattgaggaatgtaatngaaatccaaaccctaatacgtataagttcggagaggacgtgcttgagaagttgtgcttcaagaacctggggagtagggtgctggagaacttcgtgcagttccagatgataaaactgttgcggtcctagagaaaaatgcaagagatcatgatcgttaaagtttatgagttttaaggagagggagagagtgtaagcaacttttgtacatggaaaagatggttaccttttgggagaaaat

SEQ ID NO: 2949 - DNA, 390 bp, Lilium asiatic
  unsure (1)..(390): unsure at all n locations
  Clone ID: LIB3229-054-P1-K1-A12
caggagtcgtgatcagaatggaaacccctattagtaatattggcagacgatctttctcagttcagttgaacagtggtgtcnagttctgatcccttccgagagtacatataccaggtttctggcttcaaacatgtgaataaaatactacgcccttggttgctaaatagctttccagagggttataataccactcatgtagctggttaattagtacaaacagggagcccttgcaagcataccagatttttttggtacttgatcaagttaatatgttgggggtcttttcatgtatctaggcgtccctgcttgaatgtgggtctggttaaattccaaaacagtctgtaagttacatttgaaattttggtggtggacattccaatggaccgggtc

SEQ ID NO: 2950 - DNA, 429 bp, Lilium asiatic
  unsure (1)..(429): unsure at all n locations
  Clone ID: LIB3229-054-P1-K1-A2
cccacgcgtccgggggcggcggggtatcgntcgcttgangcngtggcntttggattcagtgactgaaggtgagaaacacaacaaagaaatgagtaaacaaagcgaaggaggtcacacagaaggacatgagagggagaaaatcatgtgcgaggatgctgtagctagtgttaatatggaagctgccatatcgactgacgatgttatcagagctggaggtttcggagccagagatgatatagggagcctccttcctgttgcccttgattcgacagacttcgaagcttcccttcgagatgcacgagactacgaagaacctcagggagaaatatcgaggccgggtcttggttgggctcaatctgttgagaagaggtaggtcgtattcatttctctttgatggncaagtgatgttatcattagtttctgttgaaa

SEQ ID NO: 2951 - DNA, 366 bp, Lilium asiatic
  Clone ID: LIB3229-054-P1-K1-A3
cccacgcgtccgccgttgctccaggtttcacatctgcgcatcatggtgcccaagcgcactcagcaagtcgttctgtgtctgatcagtcacacccggataagctaactggcacccaaaaagctgcacataatttaaataacgaccctgggtacaaggagaccagaggtggattggaaggtggttttaaggatcgccgacatcatgaaccaggaaatgtatcagatacttttatcagtcgatctgaatgccccgctgaagagcctgagtctggaatgggtgccccaggtgagacttctgaagctaaaactagaagttatctcactgatgcccccaagggcctctctccaatggatgttagagggaaga

SEQ ID NO: 2952 - DNA, 195 bp, Lilium asiatic
  unsure (1)..(195): unsure at all n locations
  Clone ID: LIB3229-054-P1-K1-A4
gagatcttggcggccacggcggtcggttctggtagggtatgccttccatgaaaagcgtgagaagaaagttttcctgggtggaagccgaagaagccgnngaagccgatggaaggaaaaaaaaacaccacctctttggccgaagaaggttataaaaaacaaaatccttgaataaaataattgtgaacaagggaagaa

SEQ ID NO: 2953 - DNA, 407 bp, Lilium asiatic
  Clone ID: LIB3229-054-P1-K1-A5
ggcccttctcctccgtctcccgtgattctccccagttgtttgtgacaacctttactcttgccctggtagctccacctgctgttgttcttatgagtatggtcgcttctgcttctcatggggatgctgccctcttgagtctgcctcctgctgtgaagatcacagcagctgctgccccggtgaataccctgtttgcaatgttagagatggaacctgttcaatgagcaagaacaacccgatgactgtgaaggctctggctaggactgctgcaaagccttactgggcctttcccagctctgaaggcaagaagaacaatgcataaggcattgatctgtttggccctgggaggtgaagtaaaaattgtcatgcttattatctgcactcttttaatgcattcttaggacggctta

SEQ ID NO: 2954 - DNA, 69 bp, Lilium asiatic
  unsure (1)..(69): unsure at all n locations
  Clone ID: LIB3229-054-P1-K1-A6
tctagagatccatgcttacgtacgcgtcatgncagtgatagctcttcattgtgtcggctaaattcaatn

SEQ ID NO: 2955 - DNA, 316 bp, Lilium asiatic
  unsure (1)..(316): unsure at all n locations
  Clone ID: LIB3229-054-P1-K1-A7
gggggcttcngcngctgnntccntgttttttgtttggccccnnngggttgntgtttntgtttttgtttcttcggtgcctnntggcnntgngctttttttgtgnggggtgnctggnttttcgctcnntgttcctggngntgntcnnnggtcngttcttcctgtgttcttcttccnnctttgcntgtnnttccttcttcctttttttcttgcttttcnggttngtgtggttgngnctgncnctgttngtcttttngnggtttcntgtgcccggcnttccttgcttgtgnngttggtcttcttgngttgttntttctgg

SEQ ID NO: 2956 - DNA, 157 bp, Lilium asiatic
  unsure (1)..(157): unsure at all n locations
  Clone ID: LIB3229-054-P1-K1-A9
tggccgtcgtttttcttcgtcgtgtctgggttttccctggcgtttccctnctttttcgccttgctgctcttccccctttcgcccgctggcgtttttgcgttgtggcccgctccgttcgcccttcccttctgttgcgctgcctgtttggcgtttgggt

SEQ ID NO: 2957 - DNA, 412 bp, Lilium asiatic
  Clone ID: LIB3229-054-P1-K1-B1
ggcaagaccgcagcgcgagttatcgatcatcttcgacggcgatggctctcaacggcggcctccgatcgggactgaaggcgctcatctcctccgaggcggcgctctccagatcagcgtgtcgggagctgcatgcgactggggttaagagaatgggagggcatggccatgattcagagccatactacctccatgccaagcacatgtacaacttggacagaatgaagcaccaggcactgaagatgtccctctcagttctagctgttttcagcattggcgttgctgttccggtgtatgccgtcattttccagcagaagaagactgcctccagttgatgacagcggacatactgtggggaagttgaatatgtttacttcctcctgctgtttggaaactctgtttaagctttcatttt

SEQ ID NO: 2958 - DNA, 411 bp, Lilium asiatic
  Clone ID: LIB3229-054-P1-K1-B11
ctttccccatcctcaattctctcagatctctcactaatggcgcccaagggcgaggggaagccctcgtgggggaagaagccggccgtcgaggaggagaagaaggcggttccggcggagaagaagcctgctgagaagaagccgaaggccgggaagaaggtcccggcctccaaggagggggcctctgacaagaagaagaagaggtcgaagaagtcggtggagacctacaagatctacatcttcaaggtgttgaagcaggtccaccctgacatcgggatctccagcaaggcaatggggatcatgaacagcttcatcaatgatctctttgagaagatggctcatgagtccgcccgccttgctcgctacaacaagaagaacaccatcacctctcgggagattcagacttccgtccgc

SEQ ID NO: 2959 - DNA, 415 bp, Lilium asiatic
  Clone ID: LIB3229-054-P1-K1-B12
gcgataacgccatcggcgagagtgtctgctggtgctatcatcgtttgggggaagatttaatatagctttgtgtcatttttgttgcggagaacagagagccgtgtggaagcacaatcatccaatattttatgtggttcggcttagcctacctccacggggtgaagggataatcaactatacgaagaatctgatgacttgcataggccacaagctcatctcaagaaaagggttctgatttcactcaagagaagagaactgcatggaagagcgatctaacttattgtccaataagtttacatggttgaactttgtttatgtccacatgggtgaatggagaatccactatacgaagaatctgatgacttacacatgcacaagctcgtctcaagaagatggctctgatttcacccaagag

SEQ ID NO: 2960 - DNA, 428 bp, Lilium asiatic
  unsure (1)..(428): unsure at all n locations
  Clone ID: LIB3229-054-P1-K1-B2
aggttttcccactccgccgccggcttcagctcagggtccggccacttcatcgggatgggcaagggcacggggagcttcggcaaacnncgaaacaagacccacacgctctgcgtgcgctgcgggcggcgcagctttcacctccagaagagccgctgttcgtcctgcgcgtaccccgccgcccggatccgcaagtataactggagcgtgaaggccattaggcggaagacaacaggtaccggaagaatgaggtatcttcgccatgtgtctgttaggttcaagagtaatttcagagaaggtactgaagcagctcctaggaagagagcttctgcttctgctactttttaacttgccagttggctttcttcaatgagatcagtggtttgcgcatgtctcttttagttttatctgctggattttggttggtcaac

SEQ ID NO: 2961 - DNA, 313 bp, Lilium asiatic
  Clone ID: LIB3229-054-P1-K1-B4
gatgcccaatattatctcgagaaccaaataagcaagccacttttgagaatattgggggcctatcatgaagggtgcgaggcacagagctcctccatggtagtcacactagatctttatctatttcaactccatcaaacagtggtataatgaagtttgcaaagaaacaactgacgtgccttggatgcaaagcactaatcggtaatacaggtcaaacactgtgctcacattgtaaaggaagagaagctgagttatactgcaaaacagtagcaaatgtttctgaattggagatgcttttcgggaagctgtggacaca

SEQ ID NO: 2962 - DNA, 421 bp, Lilium asiatic
  Clone ID: LIB3229-054-P1-K1-B6
caatcatatactattttttattagctaaaaaaaaatatctacttgaaacaaataggatggaacttataatagtgggtaaaaatacacattaatttcccaggaaaaataatatataaataattaaatattaaagtcaataaataaatattaatcctcaaactcaaaaatccagtcatcctacattactgaaatattataaagtaatgaaaaatttagtaatctagcacagggagatattttgtatgataccccttctctataggaacattagaacaattatgtaaactcaaccactccaatacatcttatatgtatagtctcaagtagcttgtcatcaatatcgacataactaacataatatatgtcactattatctcatatatctccttttacacacttgaaataaagtttttgacaaact

SEQ ID NO: 2963 - DNA, 105 bp, Lilium asiatic
  Clone ID: LIB3229-054-P1-K1-B9
caccactcgggaggatccaaggttaagtgggggtgcgtgccacctcatgcctcttgtatacaatgacctaaattcaattcactcgcccaccttctacaacaacaa

SEQ ID NO: 2964 - DNA, 383 bp, Lilium asiatic
  unsure (1)..(383): unsure at all n locations
  Clone ID: LIB3229-054-P1-K1-C1
cggacgcgtgggtttcagagcctatgttattttcgtttcccacctctcctctgggaggggagcgacttctgtcgtgctctccctctggtcgagcctttttaacccttatcagtctgatctacgaccagcctctctttttcaccggaagaagagttggatttggcaatcgagggaaccccaaaaaaaaaaggaatgtaaccgaaaccggcgataaaaataagctctgtttaaactagttccagtcccggagtagtgtgttcatgcgaagattggaataagcctttaacttaagcaaggaaaggggtcatacctccagccattgtggcattcgtataagcttatttgtcttctgatgtcggngctggcaggccctcgtggagcat

SEQ ID NO: 2965 - DNA, 381 bp, Lilium asiatic
  Clone ID: LIB3229-054-P1-K1-C12
cccacgcgtccgcttttttgatcatttataattatgttcctgtgtaggggtagttaacactttgtttgttgcgtaatgaaacaagtacagaaatgtttcggcagatttatatgtcacctgttttgagtatttttctagattgatattatagtttatgtcaccaaaaaaaaaaaaaaaaaaaaaaaaaaaaaaaaaaaaaaaaaaaaaaaaaaaaaaaaaaaaaaaaaaaaaaaaaaaaaaaaaaaaaaaaaaaaaaaaaaaaaaaaaaaaaaaaaaatggggggggggggttagggaacaaaaatttattccccctgttttcaaaataaaattttttttttattggcccacaaaaataaaatttttgcccggttttttaaa

SEQ ID NO: 2966 - DNA, 413 bp, Lilium asiatic
  Clone ID: LIB3229-054-P1-K1-C3
cggacgcgtgggcgccgccgtcctgctccgcctctcctcagcccaaccatggcggatgtgaagtcccctctgatgggcatgcgcactcgcaaattcatgaccaaccgcctcctctcccgcaagcagtttgtcattgacgtgctgcaccccgggagggcgaacgtctcgaaggcggagctcaaggggaagctggcctcgatctacgaggtcaaggatcagaactcgatctttgttttcaagttccgcactcacttcggaggcggaaagtcgactggattcggcctgatctacgacaacgttgagagcgccaagaaatatgagccaaagtatcggctcatcaggaatggactggccacaaaggttgagaagtcgaggaagcaaatgaaggaaagaaagaataggaccaagaaaat

SEQ ID NO: 2967 - DNA, 431 bp, Lilium asiatic
  unsure (1)..(431): unsure at all n locations
  Clone ID: LIB3229-054-P1-K1-C6
cgcccatncctggggcgaatgtgggngatgaccccccccattanccccaaactccnagtctgacctacgtaactcagtatgctgggattatgtcatacactaggggtaatatgggggatgaccccccattgcctcgactctcagcctacctgttggccaaagactcgaggatacctgcctaagatacaactatcgtcttactccataataatcagtgcaccgaaagtaactcttaaaactaaagcatgtaaaacgtgaatccgaagaatgcgacaaccattcagtacataaacacaagtgaaacactatcactacattcagaaacacaatatatctgcaagaaagaaatacatcataatgctcgagataatacatccaaaaaggtaccaagtatatatatacatatcattctggactacatcatcagtaaa

SEQ ID NO: 2968 - DNA, 368 bp, Lilium asiatic
  unsure (1)..(368): unsure at all n locations
  Clone ID: LIB3229-054-P1-K1-C8
cgttccggngtgccggggtcggcctccgcgtccgcttgnttttnttttgtttttttgggtttccncttcttngnncctctcggcgnggtgttcnntgggtgctgttttgttcncttccgcncgcnncctttcttgctgctgcntttgtcgcttctctcttgtcgtccgcgggttgggtttgtccttcgttcccctttttttctcttccntctgngttttcngctcttgnnnttcctcnggtcgntccttntccngtttcggctgtgccgtttgtcgntgcttcttctgctcgtccgctgtctccttgcttgtctccngcgggggtgntcgntgnttcttcngtgttttcngttgctgtnntccntctt

SEQ ID NO: 2969 - DNA, 298 bp, Lilium asiatic
  Clone ID: LIB3229-054-P1-K1-D10
cttcgagaagatggctcaggagtccgcccgcctcgcccgctacaacaagaggaacaccatcacctgtcgcgagatccagacctctgtccgccttgtcctccctggcgagctcgccaagcacgccgtgtctgagggcaccaaggcggtcaccaagttcaccagcgcttaggcttaggcttaggttgtggtctgttcggttttgtaatttttagctgctatcaatatgtttcgatttctgatcgaagcttatgttatttcactttcccgtcgttgaatcttaatctataataatttgttg

SEQ ID NO: 2970 - DNA, 413 bp, Lilium asiatic
  Clone ID: LIB3229-054-P1-K1-D11
gtgatttattatacatgaaagagcactatatatgcatcagtaaaaaacgaacgacagaggttggctgttactttctttggattatcttccttggtctcgctgttgctggcatcagtggttacgcagtctacaagtaccgaatcaggagttacatggactcggagatccgtgcaatcatggcgcagtacatgccgctggacaatcaaggagatgtacccaatcactcgcatggcgatatctgagtaatagatagtgtaaagagcacaaagcttggtctgcttgccgcgggggattatcaccaagttcgtcttaccgatataccctattagatgcgggggcttgttacttgttttgtgtatattagtagcatactgttttgttatggtagttgggactgatgtatgtttagtttt

SEQ ID NO: 2971 - DNA, 120 bp, Lilium asiatic
  Clone ID: LIB3229-054-P1-K1-D12
gccctaatgaaccaatggttatttctatgtagattttgttccattgttggatgatgtgctttgttatcacggtcgctatgatgcaaacattaattttagttgtatcttgttaaacatttc

SEQ ID NO: 2972 - DNA, 422 bp, Lilium asiatic
  unsure (1)..(422): unsure at all n locations
  Clone ID: LIB3229-054-P1-K1-D2
gaagaagcccgcggcggagaagaagccggcagtcgaggaggagaagaaggcggttccggcggagaagaagcctggtgagaagaagccgaaggccgggaagaaggtcccggcctccaaggagggggcctctgacaagaagaagaagaggtcgaagaagtcggtggagacctacaagatctacatcttcaaggtgttgaagcaggtccaccctgacatcgggatctccagcaaggcaatggggatcatgaacagcttcatcaatgatctctttgagaagatggctcangagtccgcccgccttgctcgctacaacaagaagaacaccatcacctctcgggagattcagacttccgtccgcctcgtcctccccggcgagctcgccaagcacgccgtttctgagggcaccaaggcggtcaccaagt

SEQ ID NO: 2973 - DNA, 405 bp, Lilium asiatic
  Clone ID: LIB3229-054-P1-K1-D6
ggccgtgcaggtgctaagggcatggccttgaccttctttactcaatcaaatgcgaggttttctagggatcttgtgaagatcctacaggaagctgggcagattgtgagtccagcattggctgcaatgagcagatcttctggtggcatgggttccggagggaatttccggtcaaggggtcgtggaggaggtagagggggagggcgaggagggtttgttcaccgatctgggtccaatgtgatcccacttggtgggaaaagagcttggtgatcatttcttggtctattatatgtagggagttcatattttctttccagttgctactctctgaattgatgggtttcttcattattgttagacataacactctgcaatattgataactgtctttaatatttggcttgcaac

SEQ ID NO: 2974 - DNA, 418 bp, Lilium asiatic
  unsure (1)..(418): unsure at all n locations
  Clone ID: LIB3229-054-P1-K1-D9
gtcgacccaacgtccgccgattctaatggcaccaagatttgtcttgaatgatggtnccactnccggcttggatgcaacattggttggttggactatgctnacctcacagcttaacgagggaaataccacagacccccagccagctgctccagtttcacctaataacgatgttcgtggaatgggatcccaagcacaacgtgctagagcttctgttccattggtttcagagcacccatcataccacaccaagatctggtctgagctttcaggaagtgttgctaaaggctcttaaggtacaggagaaagacatgcccaaatggaatgaaaccacaattcaagtacgcatcttggtccacaaaggcctaatacagtgaatgcatcaaagaaactgcctgctgaacacgacgagccttattta

SEQ ID NO: 2975 - DNA, 369 bp, Lilium asiatic
  Clone ID: LIB3229-054-P1-K1-E1
acgcgtccggtggattttttaggttcaatggcctataaattgaaggcaaatggagaggggagaagaagtctttagggagaagagaacttgagaaaggaggcttgacgaccctttgatttggagtttgcaagttccccggagcaagtttgcagttattcttctttcaatagtaagtagagttaggatttagtttatctttgagttgagtattgtaatagaatttttattttgttattgagatcaagtatttaagttcttttaatatactgttttgttatctttttagtctttattctatactcaatcttatagcttaagtttggtatagtaaactcttggaagattgatataaaattgatattattcatt

SEQ ID NO: 2976 - DNA, 422 bp, Lilium asiatic
  unsure (1)..(422): unsure at all n locations
  Clone ID: LIB3229-054-P1-K1-E2
cccacgcgtccgtgcctattgatccgaatgtgccaccattctcaccggnaacttgctaggactggagctctcagggggcggcgatatgggcactcttcggctactttgggactgttggcgagtactttggtacaccatgtatttctgcgtttgggacgaatccaagctttcaggaagcattgcagaacactaggaccgatggcattggagcactctacagagaagggacggcggcgtttctcaactccatggtgtgcaccaagtatgcattcacccctcatcaggtgactagtgcccttgcggcagccatagcctccgacaaggctgctgcagcacaggcagagctcttcaagaaggccaatgagggagactgagcattgtttggttttgttctgcttgtgtttggcagtcctagttcttga

SEQ ID NO: 2977 - DNA, 415 bp, Lilium asiatic
  Clone ID: LIB3229-054-P1-K1-E3
caggagtcgtgatcagaatggaaacccctattagtaatattggcagaccatctgggtcagttcagttgaacagtggtgtcgagttctgatcccttccgagagtacatataccaggtttctggcttcaaacatgtgaataaaatactacgcccttggttgctaaatagctttccagagggttataataccactcatgtagctgtttaattagtacagacagggagcccttgcaagcatacaagatttttttgttactagatcagtttaatatgttgtgggtcttttcatgtatctaggcgtccctgcttgaatgtgggtctggttaaattccaaaacagtctgtaagttacatttgaaattttgttgctggacatcccaatggacggggtcaacctttatattcatgttgttctat

SEQ ID NO: 2978 - DNA, 129 bp, Lilium asiatic
  Clone ID: LIB3229-054-P1-K1-E4
tggaggtggtagattaagataaaaatattcttctgattaaagaggaaggaactggatataccatgtactctgtgtgtcttctggtctgattcaaagtagtttcggttgtttattatctgatttaagtgc

SEQ ID NO: 2979 - DNA, 306 bp, Lilium asiatic
  Clone ID: LIB3229-054-P1-K1-E5
cccacgcgtccgcccacgcgtccgccctcgcgttcgcccacgcgtccggggtgggggaaaccagagcgttgtgtggagcctttggatcttggtgttgttcctgtatacccctccagccgggggtcggttcctgtcttcacttcaagtcgtggagcagtgcagtagaatgcgttaccccggtgataatttaaggtgcggatatatggcgaagggttggagagatgttaggttgtatgtatagacgtgtttgtgatgcttgtattgtatgttgttttaattgaactaagagatccggtttgaattaaa

SEQ ID NO: 2980 - DNA, 410 bp, Lilium asiatic
  unsure (1)..(410): unsure at all n locations
  Clone ID: LIB3229-054-P1-K1-E6
catctaaaggccaccagccttcctacttttatttttcttattgggctctaagaaagggagcttaaaagccttaagggccttttgaggcacttcggccaaagttgcaaccctcgccttataaacaagttcgttcacaccaaccatcggtctatgcttctgcagataatgaagatggaggtgcggcttctgatgatacaaacaccactgccaccactaatactgataatgaataatcaaacgatggtgcctatgatgataggggttttagagcactagctccaattgtgaggggttatagagcactagctccaattgtgataccatgtaatgaagtctattttcactactctcgtgagtaactggtgcagntgtatttgtatttgatatgagtggagaatatatgcccctcg

SEQ ID NO: 2981 - DNA, 316 bp, Lilium asiatic
  unsure (1)..(316): unsure at all n locations
  Clone ID: LIB3229-054-P1-K1-E7
aaaaaaaaaagatgatattgaatgaatcctgcaacaacctgaacttgagggtacgattattctgaatgttgtaagggctacaacattctttcttcnaattcttctttgtggttttgttgttgtggtctacttactctaatgggaggcttgagtttcaagaattgaaatcatcttggttgataagatataattgccgaagaaaccgagacaggaagaatgttgtatcatttagattattgagaataatagtttattcaagttcaggttgtttcaggcttcattcaatgggggggtgttttttcgtacgcgtatttct

SEQ ID NO: 2982 - DNA, 324 bp, Lilium asiatic
  Clone ID: LIB3229-054-P1-K1-F1
gggaatcgaaaaatagatccttgtcgggatgagttttttttgttaggttttcatttaggaactgaggatgaacggccatcgtatcatggaagtatagattcattgctcttgtttcttggaaggccgcggtgatgtgttgatagaaaggacagtaagcaagcgacaagagatatagaagattacatttgcaaagtgaaatagaaacctggttcttgtaagagtctggatctaaccatctctgacgattgttgtgctagtaatttgaatttgctaatagctaacaagttttgaataaacaaattggtgccagggttagaagtcgtt

SEQ ID NO: 2983 - DNA, 313 bp, Lilium asiatic
  Clone ID: LIB3229-054-P1-K1-F10
cggacgcgtgggtgcgtacaagtatttaaggaaaatgctcgctgctgggggttggcctaatcatgtgacggatgcaattctagattttcttgggagagagattgaaagacaaaagtatcagaaggcatcaatcaagcgtgatgatgtgtagcttaacatgacctcaaggtggaagttggcctgtggcaatttgttcattcttaccaatatatgcaaggtttgatttattgagtttctcattgttttgacatatgtacattactgatgttatagtttactcatgattgataaccttgtaaggtgcgttcatttt

SEQ ID NO: 2984 - DNA, 415 bp, Lilium asiatic
  Clone ID: LIB3229-054-P1-K1-F3
cggactcgtgggcggacgcgtgggcggacgcgtgggcggacgcgtggggttgggtgggacaactcatttatcgaggataatgcaacctgtcccagcaatcgtcggatttcctgaagcttcacctcggagatagagactccactagccgtgattcacagaagtttgaaagagaacatggcctgcttacagtctaggatgtaaatacttcattaggatcgagcaccatcattctgctcaagttgattggatgggaagttagtctacaccggccttggatgacgttcagagcaatcaagaggcccgtccatcgccagttcttatatgttaatgctgatggtgcaagatatgcctttgttctaacactagagataagcagatgcaagtagctatgtttggtttgtattataatgctact

SEQ ID NO: 2985 - DNA, 417 bp, Lilium asiatic
  unsure (1)..(417): unsure at all n locations
  Clone ID: LIB3229-054-P1-K1-F4
ggagcgcaatggagtactatctttgcttcctgtggcgttcgcagttgtggccagctttggtttcaggatgcgtggcactgcagggcanttgcgcagccaagagggcgagaactacgtaggtatcgacaaggggatccagccgtgctgtaacgagtgtggtagctgcacgaggtccattcctccattgtgcatctgccttgatgagatgcatgcctgcccgtcctggtgcaagaactgcaagatctcgcccaagtttatcaatccgccgctatacatatgtcaggaccgcatcgtcaactactgcgaacacaagtgtggccttggtggcggagctgccacatctgagtaactagctgcgcctatgtgcagcagtttggcgggtgaccatatggctcaagtgtcggtctatgtactaag

SEQ ID NO: 2986 - DNA, 417 bp, Lilium asiatic
  Clone ID: LIB3229-054-P1-K1-F7
ggagcagctgattctgaaggcgatccgggaggagtgctcgtgggagaacgtcccgaaacgtctccatgcgacgctctcctcgaagtaggagtggcacaggaggataatagatcactgcataaaaaaacgactacaatggaacacttgttttgcttgtaaagtgtgcaaggaaggagaatattatgaagagatgatgcgttatctccgtaagaatcttgcattatttccatatcatctcgcagaatacgtttgtcgtgtcatgaggatttcacccttcagattactactgtgacatgatcttcgaagtgatgagaaatgagcaaccgtatgacagcatccctaacttcagtgctgcagatgccttgcggcttaccggaattggacgaaatgaatttattgacataatgaacaagtgca

SEQ ID NO: 2987 - DNA, 220 bp, Lilium asiatic
  Clone ID: LIB3229-054-P1-K1-F9
taggcgcctaatataaatgcactcctgttgacggtcatgctaccaatactgtgggtgccctggtgtttgttattgagccatcattatatccttctgtgcctatgacctagccacatgtaaggaactcacacgacacctcgatgtcgatgacatttcaatatgcaccagcacagtgtgaaatattcattcgttcatatgatgcatgcacgctccagtacat

SEQ ID NO: 2988 - DNA, 287 bp, Lilium asiatic
  Clone ID: LIB3229-054-P1-K1-G1
cccacacgatcgctaaaaataaccccctccataacaaaaacatcgccctcaggagtacgtctaccggatatgttgagcggaaagatttcaaagcctcacttgacaccatcaagaccaagcgcacaacacatacatctacccggcgaacaaactaagctgagtacaacaaccaagacggcaacagtgagcatctcacatctacccagccaaaccaaacaaggcatctatcatgatccaaaaccctaccattaaatccaacacaatccctatgatataacataagctta

SEQ ID NO: 2989 - DNA, 407 bp, Lilium asiatic
  Clone ID: LIB3229-054-P1-K1-G10
ctgcttcacaggtttacatcctcgttttaagatgaatacaagctgccaggggggtctgtaattgtatgttgtgaagggaacaaggctatattcttctaacaagaattgatgggaaggaagtgggacgcgttgagagcaagctcttatgccagtctatactagatctttatattggcgacaatccttttgacaggcaagctaaagaaaatatccaactcaatttggcatctcttctccaaaaatagataatttatataagctccgtttaacttggttgaatgttttaaattatactgtaggctggtatcataataaatgtttctgcctttcgaggttatatatggtacaggaaacacagtacctgataattgtatattttcgtagagttatatgattcaataattttt

SEQ ID NO: 2990 - DNA, 236 bp, Lilium asiatic
  Clone ID: LIB3229-054-P1-K1-G12
cccacgcgtccgcccacgcgttcggcttgccaagcacgctgtctctgaaggcactaaggctgtaacgaagttcaccagcgcttagtcttacagcgtgtttaagactgatcgagcgtctgtactttgtagctgcaattaatatgtttcgatttctgatcgaagcttatgttctttcagtttcccgttgttgaatcttgctctatttaagttatttgtctccatcaatgctatatcaa

SEQ ID NO: 2991 - DNA, 424 bp, Lilium asiatic
  Clone ID: LIB3229-054-P1-K1-G3
cccacgcgtccggcaacaatggcgatcagatcatcactcgcccggatcgctcgggcgggtggatcggcgccaccggaggtccgatcggcactgatgacctctctccgctacagctccggcaagattctcagcgaggaggagagagccgccgagaccgtctacatccagaaaaaggagaggtagagggccgagaaattgaagctggagaaagcgaaggccgaagctgagaaggagaaggccgataagaaaccagaagaatctcacaagggctgatgcagctattcaccatcgttaaagctccattgcactttatgtactcaattgatgagttaatgacgatacgaaataagtgtatgtgagcatgctcgaaacgggctttagttttctcttaaggccatcgtactttttactctctttttttttc

SEQ ID NO: 2992 - DNA, 420 bp, Lilium asiatic
  Clone ID: LIB3229-054-P1-K1-G4
ccacgcgtccgcggacgcgtgggctcggcagcggcggagaagaagcccgccggggagaagcccaaggctgggaagaaggtcccggcgtccaagagcaaggagggggagaagaagaagaagagatcgaagaagtcggtcgagacctacaagatctacatattcaaggtcttaaagcaggtccaccccgacatcgggatctccagcaaggccatggggatcatgaacagcttcatcaacgacctcttcgagaagatggctcaggagtctgctcgtctcgctcgctacaacaagaagaataccatcacctcccgggagatccagacctccgtccgccttgtcctccctggtgagcttgccaagcacgctgtctctgaaggcactaaggctgtaaccaagttcaccagcgcttagtcttacagc

SEQ ID NO: 2993 - DNA, 361 bp, Lilium asiatic
  unsure (1)..(361): unsure at all n locations
  Clone ID: LIB3229-054-P1-K1-G5
cccacgcgtccgaggaggtcgaactattttctgtggaaaggttccaagcanagggtttcatgggctgtgcttgagcgggagcaactgcgcccaagtttgcataagcgagggctaccgtggtggcgactgcagcagcgtgcgacgccggtgcatgtgcaaccgaagatgcaactgagttcggacttctctaccactatcttgaaatggagcttgagtcatgatggctacatcatcagtactgtatctgtattatgtattatccactgtatccgtattatgtattaagaataataaggaggaggctcacgatcgtgcggaccatctcctgttgaatttcgagctatatatatttactatttaa

SEQ ID NO: 2994 - DNA, 420 bp, Lilium asiatic
  Clone ID: LIB3229-054-P1-K1-G6
ccacgcgtccgcggaaaaatcgatgctaaattggccgtatacaaagaccacaaggggcatttctcaacctctgtgggtctctatctcatgagtgagttctgagagagatggtgggtaagagctgtctctgcttgctagtgtttctcactgcaggatcctgcgccgctgctaacagtgcagcaagtgggtcaggctaatgctctcgacaagctatacctcgactggacaaagctcaagagggtagccggaggcagcgacattgtttcagcagaatcgacaattctcaattctgcgagaacctatgagcagcaaggattgaaggagaaagataagatctccaatctgcctggccagcctccggtgaattttgatcagtatggaggttatgtgacggtggatggggagactggaagagctctc

SEQ ID NO: 2995 - DNA, 413 bp, Lilium asiatic
  Clone ID: LIB3229-054-P1-K1-G8
ctttggttcccggtgcacgggatccgtgttgacgtccccagctccggggtgatggacttcgatgtcggaggtgtgcacaagcagttctctctgtcgctgtttgagtctccaccggagtgcgagccggtgaaagcccttgcctccggcgagggctctcgtctcgccagcatcatcgctaagagcaatttagggaagctgaggtacgatctggatcaggatgaggggaggaggatggaggcttgaggtcgatgtgtgaagatcgaagttttgacggtggattggaattgagaggtctgcaaaactggatctgtagtgttggaaaccagttggctagtttgtgttggattgtgagttgatgaaattattttctttaggttttgtaaatttggagaatgcagttatgtgttctctgc

SEQ ID NO: 2996 - DNA, 338 bp, Lilium asiatic
  Clone ID: LIB3229-054-P1-K1-G9
atttatttgattttataaattatcctttcactatccattggtatcttcgaaaaggttcgacttgaaattgttttattaatcttttcgactaaactacataatatagacaacatgcatgcatggaggaataaagatacctgcccacatatgtagaatatacaatcaatgcgaagatgagcattagaggtttgaggccccacaaaatagtgttctaatatgagttcaaaatgtcaattatgttattaaaaatagtgtcatctaaaatatgacgatgttatttgaggtcgtccatggagaagaaaactctgattaataaggccccacaaaacaattaacat

SEQ ID NO: 2997 - DNA, 351 bp, Lilium asiatic
  unsure (1)..(351): unsure at all n locations
  Clone ID: LIB3229-054-P1-K1-H1
tttagatgcaaaaggtaaattgcatattattgttggtaacatganccaacaaaagctcacagcagaaaacaagatctactcctaacaacaagcgatacccccacagtcgatcccagtgcataagaagatcagcctccgaacccatacagagtgcgtccctggcgcttgagagcatacacaacatccatcgccgtcactgtcttccggcgtgcatgctctgtgtaggtgacagcatcacggatcacattctccaaaaatatcttcaacactcctctagtctcctcgtagatgaagccgctgatcctcttcacgccaccgcgccgtgccagccgtctgatctccggcttggtg

SEQ ID NO: 2998 - DNA, 194 bp, Lilium asiatic
  unsure (1)..(194): unsure at all n locations
  Clone ID: LIB3229-054-P1-K1-H11
gntccctgggntgctcttttcctctgttgtngncggtttcnncnnccgggggccggcnnntgtgggggtgtctctccncccngcnggtccgngtgccgtctnngttcttgccgnngnnntcnngtttngtnnnggtttttggccctctttttctngctctgttgcttttgtcttttttggcctntttntttgtg

SEQ ID NO: 2999 - DNA, 422 bp, Lilium asiatic
  Clone ID: LIB3229-054-P1-K1-H12
tatcccttctcctccaaatcccccaatctcgaaaccctaaccctaaacgtgtgctgcaatggcccgtgcgtagcagaccgcccgcaagtccaccggcggcaaggcccctcgcaagcagctcgccaccaaggctgctcgcaagtcggctccgacgactggtggagtgaagaagccccatcgctacaggcctggcacggtggcgctgcgtgagatccgcaagtaccagaagagcactgagcttctcatcaggaagctgccgtttcagaggctggtgagggagattgcgcaggatttcaagacggatctgcgtttccagagccacgctgtccttgctctccaggaggcggcggaggcgtatctggtgggtctgttcgaggatacgaacctgtgcgcgattcatgccaagcgcgtcaccatcatgc

SEQ ID NO: 3000 - DNA, 225 bp, Lilium asiatic
  Clone ID: LIB3229-054-P1-K1-H5
gaaaaatgtgctccgaactcacacgactgctgtttctgcaagaatgctttataagctagctcagcagatacgtgtgatgcccaagaggtatttctcgatagatcgtgttttccggaacgaagctgttgatcgaactcatcttgcagagtttcatcagatagagggtctcatttgtgatcggggacttacccttgctgacctctttggcgtattgcaagagttctt

SEQ ID NO: 3001 - DNA, 151 bp, Lilium asiatic
  unsure (1)..(151): unsure at all n locations
  Clone ID: LIB3229-054-P1-K1-H6
cccacgcgtccggggagaaaagaggaaacacccgaagaaacctctacggggagggggagggataccccatggggtcgaggaggaactaggagtccacccgagtctccgcagaagagggacgaggggggagagggggggggggggcangagg

SEQ ID NO: 3002 - DNA, 224 bp, Lilium asiatic
  Clone ID: LIB3229-054-P1-K1-H7
agaacttgggaactcatcaaataataccactgtgttcataccccaaatggggttgtagtagcggatgtggtggtgttttattataggtgtacaaagatgttggatgaatttgatttgatttaagaatcttggataaaggaatgttggctcatatttgtattcactgatgcttaaaatgttaatcttcataaaatttttaatatgacagagagttcaattgattc

SEQ ID NO: 3003 - DNA, 413 bp, Lilium asiatic
  Clone ID: LIB3229-054-P1-K1-H8
cccacgcgtccggagagagtccgtgctaaccggcctgaaagagatttggggccgctgcatacattgactggtggtgttttcgtggcgttaatgatggctcagatcgaggtcctaaggaagaagggtcattcctactcggagataatcaacgagagtgtgattgagtcagtggattccctaaacccttttatgcatgctcgaggggtttcgttcatggttgataattgttccacgactgctcgtttgggttcgaggaagtgggcaccgcgtttcgattacattcttacccagcaggcgtttgtggctgtggacaataatgctgcaatcaatgaagaccttcggagcagtttcttggttgatccgattcatggtgccatcgaagtatgtgcgcagctgaagcctactgtggacat

SEQ ID NO: 3004 - DNA, 296 bp, Lilium asiatic
  Clone ID: LIB3229-055-P1-K1-A10
ggttcgcaactgaagtttgccggcaatgctactgagttcgggattttctttttggtcatctctggggttcgttggtgtaaggtaggcaaaattttgatcgggctgtttgtttggttcttacccaccgatttggaaataaggtgtgtagcccttgaaaggcagtttcaactgtggttgtggaatccgtgttggatcagctcctgcaccatctatggcaaataataattaggtggtcaaacattgaaatgcagagaatttggcgacttttagttaaaaaaaaaagaagtaatggtaac

SEQ ID NO: 3005 - DNA, 208 bp, Lilium asiatic
  Clone ID: LIB3229-055-P1-K1-A11
gaacccatgaatgtcgacaatgctgctgtctgatcctgttcctcttcttttagtctggttaggcatctaaagacactattctaaatttgtggtagagacatataggaataatggtgtagggtgttttctgagtatttggaaaaagtgtgggctttttaaaaatgtcctatcaaatgagcttatggatatggtatggtgttttctgagt

SEQ ID NO: 3006 - DNA, 396 bp, Lilium asiatic
  Clone ID: LIB3229-055-P1-K1-A2
ccgacgcgtgggttccaaagctcaaatctctcatcaatcatgtcaggccgtggcaagggagggaaggggctcggcatgggcggcgccaagcgccatcgcaaggtgctgcgggacaacatccagggcatcaccaaaccggccatccgccgcctggctcgccgtggtggagtgaagaggatcagcggcctcatctacgaggagacccgaggcgtgctgaagatatttctggagaacgtcatccgcgatgccgtcacctacactgagcacgcgcgccgcaagacggtgacggcgatggatgtggtgtatgctctcaagcgccagggacgcaccctctatggctttgggggttgatctagttctcctgacctgggtctctgttagtttttgtttggatgg

SEQ ID NO: 3007 - DNA, 361 bp, Lilium asiatic
  Clone ID: LIB3229-055-P1-K1-A4
aaacaacccatccaactgaacccaacatcctttatctctcgcagtgaggtttcctggcaaggctgctcgaatgaatattggtggacaagtcccactgtcggaacctgcaccttcttctgaggctacaaaggtgatggccgaagaagatgattatgatttggatctctttggtgatgagactgaggaggagaagaacgcacctgaggagagggaggctgctgtcaaagcatgctctaaaaagaaagagagtggcaagtcctctgtcctattggaggtgaagccatgggatgatgagactgacatgaagaagtttgaagcagcagtccgcagcattgaaatgcctggtctcttatggggtgca

SEQ ID NO: 3008 - DNA, 107 bp, Lilium asiatic
  Clone ID: LIB3229-055-P1-K1-A7
cccacgcgtccggttttaaatcgccagccttccctatacaggcttccaacgtagggacgcgtgcatactatgtcctaactctaatatagtggcacctaaattaaatc

SEQ ID NO: 3009 - DNA, 300 bp, Lilium asiatic
  Clone ID: LIB3229-055-P1-K1-B11
aactcttggggtgaaacctggggtgagaagggctactacaagatctgcaggggtcgcaatgtttgtggggttgactccatggtctccactgtggctgccgtccatagctcacactagattgactagatttactgttccagtgcctgttaccatgttactgtaggcctggtgcattaattattgccgctttgccagttatattcttcgccagttatattctgcatggttacggcttatgtgaacttagcgtgtattatgtgtataagttgcttggtattaggaaactgcataagattgtac

SEQ ID NO: 3010 - DNA, 303 bp, Lilium asiatic
  unsure (1)..(303): unsure at all n locations
  Clone ID: LIB3229-055-P1-K1-B12
aactcttggggtgaaacctgttttgtaatagggctactacaanatctgcggggcggtcaatgtttttgtgttttggctccatagtctccactgtggctgccgtccatagctcacactagattgactagatttactgttccagtgcctgttaccatgttactgtaggcctggtgcattaattattgtcgctttgccacttatattcttccccagttatattctgcatggttaccgcttatgtgaaactaccatgtattatgtgtataacttctttgatattaggaacctgtttaaatattgtac

SEQ ID NO: 3011 - DNA, 267 bp, Lilium asiatic
  Clone ID: LIB3229-055-P1-K1-B5
ctctcacaagatgttggagctccgtttggtgcagggcagcctcctgaagaagctgatggaagcaatccgcgagctggtcaccgacgccaacttcgactgctccgccaccggtttctccctccaggccctggactccagccacgtcaccctcgtcgctctcctcctccgatccgaggggttcgagcactaccgctgcgatcacaacctctccatggggatgaacctcaacaacatggctaagatactccgatgcgcccgcaatgatga

SEQ ID NO: 3012 - DNA, 307 bp, Lilium asiatic
  Clone ID: LIB3229-055-P1-K1-B6
agcagccgctcgaagaaaacaggaagctagaaaggcaatcggcgaaaccctaaggtgagggcgaagtggaagaagaagcggatgaggaggctgaagaggaagcgccgaaagatgaggcagagatccaagtagatgccgctgcaggactgtaatgcatgcatcgtggcttactgttggattaagttggctcttttattgttaagtttggtgttttaggggactgactatctggttcttttttgtttaaattatgaagtttttaattctcagttaatctaaatcttggcactttttacatgttttgggt

SEQ ID NO: 3013 - DNA, 423 bp, Lilium asiatic
  unsure (1)..(423): unsure at all n locations
  Clone ID: LIB3229-055-P1-K1-B8
gacccatgtcgtcggcggcagtaccggttggacgattccgcccaatgccacctggtactccgactgggcttccagccagaccatancccccggcgataaactcgtgttcaatttcccccagggcgcacatgatgtggccaaggtgccgaaatccagctacgactcctgctcgactaccagccagatcggcaccaccctcaacaatggcccggccactgtcaccgtcgcctctggcaccaactactacatctgcgccttccccggccactgcagcgccggacagaagctggctgtcactgtcagcgctgctgcaacgactgtgtcaacaccagcagcggcgccgaaggtagctgttccagtcccagctgctgcacccgttgttgcaaacagcccgaccacactccccagtgcagagagcccggg

SEQ ID NO: 3014 - DNA, 124 bp, Lilium asiatic
  unsure (1)..(124): unsure at all n locations
  Clone ID: LIB3229-055-P1-K1-C12
cgggctaggttctaggatcgcgggccggcccgctctangaggatccaagctttatcgtacgcgtgcatgncgacgtgggtagcggtcttctatatgtgtcacgctaagatgtcaattcaactgg

SEQ ID NO: 3015 - DNA, 422 bp, Lilium asiatic
  Clone ID: LIB3229-055-P1-K1-C2
ggccgctgtagagtcagcccccgctgtagagtctccgcctaccttggtcgaggggccaggcacatcagatgtccctccggtgaagccggccaaggtgaaggccacgaaggctcccaaggaaaagaaggccgtgacgaagaagccggccctacatcctacctatctcgagatgatccgcgaggcgatagcctccctcaaggagcgaaccgggtcaagccagtacgcgatctcaaagtttgttgaagacaagcacaaggctcatctcccggcaaactttaagaagatcctcctcgttcagctgcggaaactcaccgctgccggcaaactcaccaaggtcaagaactcttacaagatcgctgcaaagcctgttgcttctgtgaaaaagacatctgtctctgccaagccgaagataaagtctgctg

SEQ ID NO: 3016 - DNA, 424 bp, Lilium asiatic
  Clone ID: LIB3229-055-P1-K1-C3
cccacgcgtccgcccacgcgtccgcccacgcgttcgcccacgcgtccgcccacgcgtccgatctacatcttcaaggttctcaagcaggtccaccctgacataggcatctccagcaaggcgatggggataatgaacagcttcatcaacgacatctttgagaagctcgcccaggagtccgcccgcctcgcccgctacaacaagaagccgactatcacctcccgtgagatccagacctccgtccgccttgtcctccccggcgagcttgccaagcacgctgtctctgagggtaccaaggccgtcaccaagttcaccagtgcttagattggtctgatctggtgttcatatgctgggatagggattgcctctgtagttatcttggtttcgtggttgatgttttgtcatctgagtggtttgtagcatttat

SEQ ID NO: 3017 - DNA, 362 bp, Lilium asiatic
  Clone ID: LIB3229-055-P1-K1-C5
ttcaacgccaacaatcatccattaccatcgcttctgtgcaaggaaaggagaagggagccagatcttgatgtacggtaggtagtggattccccccacgcgatgatggtgacgggggtggaggtggtggaggcggaggaggcggttggtcgggagggttcttctttttcggcctgctagcatttcttggtttcttgaaggataaagaaagtgagggtccttatcgagatagtaggcgaagatgaggcgctctattattgtgctggtatatctgatactgtgcctatccatgcatatgtgctgcttttatattataaggcacaattgttgtcatctaaaatccgctttattacttttaatgatat

SEQ ID NO: 3018 - DNA, 373 bp, Lilium asiatic
  Clone ID: LIB3229-055-P1-K1-C7
tggacacgtaggaatcatgttcgacttcgatgagacccaacccctcctgcgcctgggccccattccaggcagctacggcatcccctacttcaccgacatcagcgaccgtcttgactacttttacctccaaggtgagctcactttcttcacctcacgcatgaagaagtataactctaccgttctccgcctcaacatggcccctggcccattcatcgccagcgacttccgcgtgatcggcggtctcgaagctgtcagctttccgggtctattttacagagataagattgatgagaccgacacactcaccggcacctacgtacccttcacctttgttaccggatggttccgggtgtgtgcctatcttgatccattg

SEQ ID NO: 3019 - DNA, 332 bp, Lilium asiatic
  Clone ID: LIB3229-055-P1-K1-C8
cccacgcgtccgctcttttcaactacaatcttcaatggcgcccaaggctgagaagaaaccggtggcggagaagaagccggtcgaggaggagaagaagtcggtccctgcagagaagaagcctgctgagaagaagcccaaggcagggaagaaggtcccggcctccaaggagggggcctctgacaagaagaagaagaggtcgaagaagtcagtggagacctacaagatctacatcttcaaggtgctgaagcaggtccacccggacatcggaatctccagcaaggccatggggatcatgaacagcttcatcaatgacctcttcgagaagatggcgc

SEQ ID NO: 3020 - DNA, 299 bp, Lilium asiatic
  unsure (1)..(299): unsure at all n locations
  Clone ID: LIB3229-055-P1-K1-C9
cccacgcgtccgctcttttcaactacattcttcaatggcgcccaaagctgaggagaaaccgttggcggtgttgaggcccntccaggaggaaaacaagtcggtccctgcagagaagaagcctgctgagaagaagcccaaggcagggaagaaggtcccggtctccaaggagggggcctctgacaagaagaagaagaggtcgaagaagtcagtggagacctacaagatctacatcttcaaggtgctgaagaaggtccacccggacatcggaatttccaacaaggccatggggttcatgacca

SEQ ID NO: 3021 - DNA, 323 bp, Lilium asiatic
  unsure (1)..(323): unsure at all n locations
  Clone ID: LIB3229-055-P1-K1-D1
cccacgcgtccgctggtatgcaaactcaaattgtttgaccaacagtgagtttgaggcgggtgttagttgtatataggtagcatgtgtatagcgcgcgtagtgtgttagtggggtgtgtgtatagaaggctctacttgtatatatgttgccgttggatggctgatgagtccagccattcaccatttctctctttgtaactgtgtaaattgacggttttacataaaaaactgcacctacaaaataataatggtttgaccggaaaaaaaataaaggtttgnaaaaaaaaaataaaaaggaaaaaaaaaatataaaaaaataaattt

SEQ ID NO: 3022 - DNA, 261 bp, Lilium asiatic
  unsure (1)..(261): unsure at all n locations
  Clone ID: LIB3229-055-P1-K1-D11
gctctatatcgcactctctttttcttttttacccaagcacacacacgcgcgcacgcgacattatatcttttttagccacacaccaaaanacaacacactccccccccatacacaacctcaacactcaaaaaaccctccctacacccaactaaaacacctcacaacacacccccctaaccacaactcgcctaatagcaaagacccccacaccgatcacccttccaaacagacccacaacctaaatcacaaacgacacacccc

SEQ ID NO: 3023 - DNA, 404 bp, Lilium asiatic
  Clone ID: LIB3229-055-P1-K1-D4
gcgatcacgccgccactcccatccggatgatgaacttcatctcagaggagcaggtggacgttgtaaagcataccagaggcgagcggcctgaagacggcaccgcccagcgagatcggcccctgtttgagatcctacaagagaataaagacaaaaaagatgcagaattcaacgagagattcaagcatcggccacccaaagctttggatgaagatgagacagaattcttagataattatgagatgtcaaggaaggcttatgagcggcaactggccgatgaagaagctgaacaactacgtagtttccaagaagctgtggcagctcagtcctcggtagtacaggagcttaaggagacacctacggctctgagaatcgaggaaccgaagccggtcgtgaagaggaatcag

SEQ ID NO: 3024 - DNA, 406 bp, Lilium asiatic
  Clone ID: LIB3229-055-P1-K1-D6
atacagtgtgatgcaaggtacgtcatttatcatgttgatcgacacgagcatgagtgatgcttggttttgtgataccggaccgactttcgatatactggataggaaatcaagttcaggaaacctagattatcaagttgctggcattgactggaatttcaatagctggggcggaccggaagaaggctgttatagtgataggagtctggaccttgatgttgccaacaagattgcggaagtggagaggcttgctacatttccacatcagatggatcttgagggcggaagcattcatgtacacggagaaggtacttgtataacaactgaagaatgcttgctaaatcctaatcgcaaccctggtatgacaagggagggaatagagaatgaattgaagatgtattttggtgtc

SEQ ID NO: 3025 - DNA, 380 bp, Lilium asiatic
  Clone ID: LIB3229-055-P1-K1-D7
ggcgtgggggactgccgagaaggtccctgaggtggcccggtctgtggcgggggaggtgaagcgcgctggcgtggtggggactgcaactggtgcagtgaaggcggcatacgagacctgctcgccggtggcaagggacttgtatgtgcattatgaacccgtggcggaggagtatgcagtgtctgcgtggagggcgctgaatcggcttactctgttcccgcaggtggcgcagaatgtggtccccacggcggcttactggagtgagaagtataacaagttggttgggcttgcagcggaacgagggttcacggtggcagagtatgttcctctggtcccgactgagaggattgctaaggtgtttgggggtgacgttgatcctgtgg

SEQ ID NO: 3026 - DNA, 399 bp, Lilium asiatic
  Clone ID: LIB3229-055-P1-K1-D9
cctgggtctgggtgtatctgctgcgctgcttggagtgatgggttctcgtttcatgaaatctggaaaggtttttccggccggcgtagtctcggtggtctcctttgtcatggtgggcggttatcttcatggggttctgcgtagcctgcactagcgtatgtctgttctgcctttgcaaatcagtacgagcttcactctgtagtctccccaaatcgggaatttatgtaagtttgcactgctaccttttgtattttcttttctgcctttgcttttgtctttagtataattggagtaagattatgtataatgtcatggtatggtaaataaattatgttttctgtcccttgctagtaaaaacccgcacacgcacacatgcacattatgtgtgggcggaattaatat

SEQ ID NO: 3027 - DNA, 74 bp, Lilium asiatic
  Clone ID: LIB3229-055-P1-K1-E1
ttctagaggattcaagcttacttacgcgtacatgcgagggcataacttttatatagtgggacctaaacacaatt

SEQ ID NO: 3028 - DNA, 257 bp, Lilium asiatic
  Clone ID: LIB3229-055-P1-K1-E10
gctagagctaactcctaggcttagcttttgcgatactccgctgcaggtgagagtgaagatgcgaaggctggaatgttccataagggatatacctactaagcaggcgatcaaccgaggttaccattttccgttttgtttaatcgagatgttcggtatgtaatatgtaatcggaggtgtttcataatccgtatcggcgtggtatcaataagagttcttttttgcttgttaagatggcgttatcaaataagcattggcag

SEQ ID NO: 3029 - DNA, 351 bp, Lilium asiatic
  Clone ID: LIB3229-055-P1-K1-E12
gatgacgcaacgcctcacaccttcattgctccgacaacctcacatcttgacggggatgatactactgcttcagtgccgctcccgaaccagttgaagacggagctctgaatctgctggactaaggtggtgggctgcttgccttgataagtaggttgctgataagttgtacaaagaggatatgataattattgttaggcagagtagagggacagacgagagtgacgaacattctccttacattcttttagaggctagtaccacttctctgctcttttaactttgcaacaatctcatcaaccttttgtcatgtttacactagtatcgttgtatatgtgatacttgttctagctc

SEQ ID NO: 3030 - DNA, 420 bp, Lilium asiatic
  Clone ID: LIB3229-055-P1-K1-E3
gcctgtcctccacgatgttctcctttaaacttgaagatggtaaacatccatttagcctggcaaatattgccactgtgatgaatgtcacagaaaagctggaatcacgacatgagtttcctcctgagaaattcgttgaaacaatgaagctgatggagcatcggtacggtgccaaggattttgagacaagcaaagacaccagcttattggctcctggaacgttctacctcaccaatgtcgactccatgtatcggaggtactatgccaagaaggaggtgtttggcaaagctccaaattgttcactagtcaatggacactaatgatgcggtgacaaatcttggatgctgttattgtcttttctgttgtattaaataatgatggtagctaatttgcaaggttttgataactagagcaggtagtttc

SEQ ID NO: 3031 - DNA, 381 bp, Lilium asiatic
  Clone ID: LIB3229-055-P1-K1-E5
cccacgcgtccgcaactacaaggggaaatggaaggcacctatgattgacaaccgtgattgcaaggatgatccttacatttatgcttttgacaatctgaaatatgttggcattgagctatggcaggtgaaatccggaacattgtttgacaatgttctagttgctgatgaccctgaatatgcaaagaagcttgctgaagaaaacatggggaaagcagaaggatgctgagaaggccgcatttgatgaagctgagaagagtaaaactgaggaggagtcgaaggatgatgatgatgctgatatagatgatgaagatggttttgatgatgctgatgcagcggatgaggatagtgatctagagaaggaagaggatgctcatgatgagc

SEQ ID NO: 3032 - DNA, 423 bp, Lilium asiatic
  Clone ID: LIB3229-055-P1-K1-E6
cgggccgccgagatcaccgtcttccgttcctatctcctgtcctcagtagccatggtgaaggactggagagatccctctaattccaccaaatcctccaagagcatggggagggatctgagggttcacttcaagaacacacgcgagactgcattcgcaatcaggaagatgcctttggccaaggcgaaacggtatctcgaggatgttattgtgcacaagcaggccattccgttcaggaggtattgtggaggtgttggccgtactggccaagtcaaggcacgccattcaaatgggcaagggcgctggcctatgaaatctgctaaatttattttggatctgctcaagaatgctgagagtaatgcagatgtgaagggcttggatgtcgatgctctttatgtatctcacattcaggttaatcaagctcag

SEQ ID NO: 3033 - DNA, 418 bp, Lilium asiatic
  Clone ID: LIB3229-055-P1-K1-E7
ttcaaatactatgaaatgctacttgatatacaaaagtcggttaataaaagggtcggagcttctttgaacgggaccaggcggaacagtaactgggagcaacgccctttgaatcccaatcagttggagtatgctgctcttgacgctgttgtcctcgttcatatattccgtcatgttcgtgaccatggccatccttattctgctgccaatgacgagggctgcaaagttgaatggaaatcgaagattgtttcacacatgggaaaggtgagaagggtgactacatcatagaacctgcaaattggttggaaaaaaatgttcagatgtatgtaacaaacatgaaacttttgcttatgactccatgtaaatattttatgtagtggcacttttggacagacttgttttgtgatagacaaacagctta

SEQ ID NO: 3034 - DNA, 77 bp, Lilium asiatic
  unsure (1)..(77): unsure at all n locations
  Clone ID: LIB3229-055-P1-K1-E8
accctcgggaggggccaaacttttatacgcgtgcatccnacaacataactcttctatagcgccacctaaattcaatt

SEQ ID NO: 3035 - DNA, 411 bp, Lilium asiatic
  Clone ID: LIB3229-055-P1-K1-E9
cccacgcgtccggaaagagagagggagagggaaagagaaaaggaccgaattgcgggtgaaagagccacacgtgaagctcctgaaaaatcactttctgaatcccgcgaaagggctgagaggattgctgttgagagggttactgctgaagctcgacaaagagcacttgcagaagcccgagagaaagcacacaacgcttctgctgaagctttagagaaatcatttgctgagaaggctgccaaggaagctagattgcgaactgagcgtgctgcagttgagcgagcaactgcagaggcccgcgaacgtgctgtataaagagcacttgctgagaaagctgctgcagatgcaagagagcgagcagaaaagctcaatgctgtctcttctagagaaaaagtcaaacaaagactaattcaa

SEQ ID NO: 3036 - DNA, 391 bp, Lilium asiatic
  Clone ID: LIB3229-055-P1-K1-F10
tcgattctcttgctgatgataccttgttcgagttgaggagacttttgggggctgatctactggaaaaacgagagtgaacaagccaaagttgggccttgtgaaatggaggttcttaatgactcacgcattagtaattcatcaatgcatccttgcaaagacaatgaaccgccagatgaggatgttgatattggtggtaatgatcctcccatctcaagctatcctcctgtggagatagaaaaagatacagctcccagaagtagcaagtgtagcaattcaagcagttctagcagcggctcaggttcttcgtctaatgatttaaaattttggaggtttttaagaagggacttaaattattagccttaaaaaacttgttaagcttatttttggcgaa

SEQ ID NO: 3037 - DNA, 212 bp, Lilium asiatic
  unsure (1)..(212): unsure at all n locations
  Clone ID: LIB3229-055-P1-K1-F12
gaaaaaaaaaaaaaattaaattttaatttataaaaaaaaaaaaaaaacgggggcccgtctacattttataaattttacggacaccccaaancnacgccataacaaataaataaagtcacctaaatacaaaacactgacccacgaatttacaacaaccaaactcaaaaaaccctcacataacccaacttaaatccctatcaacacatccccca

SEQ ID NO: 3038 - DNA, 325 bp, Lilium asiatic
  Clone ID: LIB3229-055-P1-K1-F3
ccgacgcgtgcgccagactataacggtcgatgttcactcaggctagaaagctggggggatcttctctagcactgggtagaggacttgatatgcatcctgatccggaccttttatgccatcactgaatttccttctgcactccatgcagatagaaccaatctataattcactagcacagaaaaacacagatagatcattgaccaaattaaaggataagcctacgaaagatgcatcatcctgcatcattgtatctcctacaaacgtcttaccctgttatattagcatatttcagcaggagatggaaatgattaaaaatatctattta

SEQ ID NO: 3039 - DNA, 419 bp, Lilium asiatic
  Clone ID: LIB3229-055-P1-K1-F5
gtcggcgccaaccactggcggcgtgtttaagccgtaccgctaccgtcccggcagcgtcggcgtccgtgagatccgtaagtaccagaagagtacggagctgctgatccgaaagctgccgttccagcgtctggtgagggagatcgcgcatgacttcaagacggatctccgtttccagagccatgccgtgctggcgctgcaggagcggcggaggcgtaccttgtggggctgttcgaagacaccaatctctgcgcaatccatgccaagcgcgtcaccatcatgcctaaggacatccagcttgcgcgtaggatccgtggggagcgcgcttagaaagttatgggtttctctctctggtagttttatgttttagctcctgtgaactgtcttttggatgttttgtgtgtgtttctcaaaccttaaca

SEQ ID NO: 3040 - DNA, 421 bp, Lilium asiatic
  Clone ID: LIB3229-055-P1-K1-F6
gattgacaagcatatgtatcatgatatgtatatgaaggttaagggtaatgtgttggagagggagagggttctgatggagagcatccacaagtcgaaggctgaaaaggcgagggagaagactttgcatgaccagtttgaggctaagcgtgctaagagcaaggcgagtagggagaggaagcatgcacggagggaggagcgactcgcccagggcccagttgaacgagtacctgcaccagtagcagcacctgcacctgcacctcaggctgccgtggctcctaagaaaaccaagaagtaactcagctcaagttggtagtatctgctggattagtgcttttattctccttttgggtatttggaatgttatattatgatcatgggaccatgtagaagcctcataagatacatctgcagctctttcatt

SEQ ID NO: 3041 - DNA, 323 bp, Lilium asiatic
  Clone ID: LIB3229-055-P1-K1-F8
cggacgcgtgggtctcgaacggttcactgtcttctcaaggatggtcttgggcgcgctattcgacacctgggcctgtccgctggtctgcggatggtaaggtgtattaactcgatgctcgatcccgttcttcttcatgagttttacaaatatccgattgcaaaaagtcggtaccgccatcactgatgatggtacggggcattccgtaacgcgcaaatatatgattctggaggaacttgaccacaaccttgtgatcattcgtgagacatggctgggcttcaacccacttggagacgtagtcgactgccacgagaatgtactcgtag

SEQ ID NO: 3042 - DNA, 279 bp, Lilium asiatic
  Clone ID: LIB3229-055-P1-K1-F9
cccacgcgtgcggttgtacctaagccatagactgctgctacagctaaggcggcggagacatgtgtcaaaccttccgccgcaaagaatgcggctacctaaagctaataaaaatgctcagccgttgaagaaagcaacaactgccaaaaaagcgaagaaatagatttatatctctggcgggacagacttgatttgtaccgctgacgttatagcatggttattttgatgacaatggaagcacttcaaaggctgtcattttcttaatgacaatatctcgctcgg

SEQ ID NO: 3043 - DNA, 397 bp, Lilium asiatic
  Clone ID: LIB3229-055-P1-K1-G1
cccacgcgtccgctgccgcagcgtgaagccgccgatcgccatggcctccgagaagaagctctccaacccgatgcgggagatcaaggtccagaagcttgtcctcaacatctccgtcggcgagagcggcgatcgcctcaccagggcctccaaggttttggagcagctgagcggacagacgccggtgttctcgaaggcgaggtacactgtgcggtcttttgggatccggaggaatgagaagattgcttgctatgttactgtgagaggtgagaaggcgatgcatctactggagagtgggttgaaggtgaaggagtatgagctgttgaggaggaatttcagtgatactggatgctttgggtttggtattcaggaacacattgatctcgggttaagtatgatc

SEQ ID NO: 3044 - DNA, 204 bp, Lilium asiatic
  Clone ID: LIB3229-055-P1-K1-G10
atttcgtttcataaagaaatcaacttattcaagaaaaaaaaaaactttggtgatgggatgggaatgaatcaaaaaaggttatatcataatcctaccataacaaaactaaaatcttggttcttaccagaatttgtgctactttttgaaacatataaaattaaaccatggattataccaatccaatttcttcttttagattttcat

SEQ ID NO: 3045 - DNA, 183 bp, Lilium asiatic
  unsure (1)..(183): unsure at all n locations
  Clone ID: LIB3229-055-P1-K1-G11
cccacacgtttnnantnaattttatattttcccaacaacanaccacccgcacgcgggtaaacttttctgcgatctaccaacnnaaacaccnnncaccccccattacaatcacacaaaacaaccacactcaaccaacacaccgcaatcaccaaataccccccaacaacaaccacaccaataact

SEQ ID NO: 3046 - DNA, 410 bp, Lilium asiatic
  unsure (1)..(410): unsure at all n locations
  Clone ID: LIB3229-055-P1-K1-G12
gcaggcaatcagtgcaggccatgtagtggccgtgagtgctgtgaatgggattgggctcgtcaagctgatgggcaggaacacgggccacattgcccttcatgccacactaagcagtcgtgatgtcgactgttgtttgatcccggagactgacttctatcttgaagggaagggtgggatgtttgagtttctcgatcaaaggctaaagcagaatgggcatgcggtgattgtggtagctgagggtgctggtcaggatataataccgagaactgaagcgcagaaggaagagagggacgagtctggcaatcctgtgttctttgatgtgggagcatggctganatccgagctgaagagatgggtggagagggaccattaaggagagctattcacagtgaagtatatcgatccgatgt

SEQ ID NO: 3047 - DNA, 294 bp, Lilium asiatic
  unsure (1)..(294): unsure at all n locations
  Clone ID: LIB3229-055-P1-K1-G2
gcgtncgccacgcgtncgctgtctcattgtgattccgtttatcgccatggcctnccagacgaagcgggccaaccttatgtttgtgatcacaatccagaagcttgtcctcaacatctccgtcggcgagagcggcgatcgcctcaccagggcctccaaggttttggagcatctgagcggacagacaccggtgttctcgaaggcaaggtacactgtgcggtcttttgggatccggaggaatgagaagattgcctgctatgttactgcgagaggtgagaaggccattcatctactgca

SEQ ID NO: 3048 - DNA, 400 bp, Lilium asiatic
  unsure (1)..(400): unsure at all n locations
  Clone ID: LIB3229-055-P1-K1-G3
acgcggacgcgtgggtttatggcatacatgaagcgttatgtcaagcagttgacccctgaacttgatgcccagctttaggtgctatttaaaaaacacattgagggggccattaagtttctgcttccgaagcttaatgatctgcaattttttgtgggtgagaacattcaagatgacaatagcctggtgtttgcttattacaaggaaagtgctactgatccaacctttttgtacttcgcgtaccgattgaaagaaatcaaatgctaaacttgaaaaatggcaacatattggaaaaatagtttaatttactaatttgcttngtgtgctctatggatgttgagatattatgcttggtttttatccggtactgggtacctgttcaaaagaactttttgtactgctg

SEQ ID NO: 3049 - DNA, 397 bp, Lilium asiatic
  unsure (1)..(397): unsure at all n locations
  Clone ID: LIB3229-055-P1-K1-G4
tgttgccttgctatatcatggcttgggccatatgtatcctacaacgtcngagacagagacaggaggctgctgctctagctgccagcgaggtggcgttcatcctgcagtccagtcaggcaaggggtctgcagttcaccatcgcaccggaatcgccagctaccccccagcaagaaccacatcaataactgctgcctttactatgttttcactgtgttgtatttgctttggtgaggggatgtttacagggctggtggtgcatttacccccttccaagtttattaaggggttggcacccttttttcttaccaccacctttacctggttctggaaatttggaatagtttggaagagacctttgtattttataaacaaattttttgtgtggtggcggtctttt

SEQ ID NO: 3050 - DNA, 422 bp, Lilium asiatic
  Clone ID: LIB3229-055-P1-K1-G6
acgccagaggctaatctttgctggtaagcttctggtggacgggaggactcttgctgaggacaatatccaaattgaatgcaccctccacctggatctccgtctgcggagaggtatgcacatctttgtgaagaccctgactggcaagaccatcacccttgaggttgagagctccgacaccatcgacaatgtgaaggccaagatccaagataaggagggtattcccccggaccagcaaaggctcatcttcgctggcaagcagcttgaagacggcaggacccttgctgactacaacattcagaaggagtccacccttcatcttgtcctcaggctcaggggagggatgcagatttttgttaagaccctcactggcaagaccatcaccctggaggttgagagctctgacactattgacaatgtgaagg

SEQ ID NO: 3051 - DNA, 411 bp, Lilium asiatic
  Clone ID: LIB3229-055-P1-K1-G7
gcaccaagcagactgctcgcaagtccaccggcggcaaggcaccccgcaagcaggtggccaccaaggcagcgcgtaagtcggcaccggccaccggcggcgttaaaaagcctcatcgcttccgccccggcaccgtggcgctccgggagatccgcaagtaccagaagagcacggagcttctcatacgtaagctccccttccagcgccttgtgagggagatcgctcaggacttcaagactgacctccgcttccagagctctgctgttgcggcactgcaagaggcggcggaggcgtatcttgtgggtctgtttgaggataccaacctctgcgccatccacgccaagcgtgtcaccattatgcccaaggatattcagctcgcccgacgcatccgtggagagagggcttgatcggcag

SEQ ID NO: 3052 - DNA, 407 bp, Lilium asiatic
  Clone ID: LIB3229-055-P1-K1-G8
cggacgcgtgggtggactttatgcattttttgctatgagtttatctatggcgtgcctccatttgaagcggtggaccagtatgatacattcagaaggataatgaaggttgacctgaaatttccatccacgaataatgtgtcacccgaagggaaggatcttatcagcaagcttctggtgaaagactcatcaaagagactctcccttcaaaagatcttggagcatccctggattgtcaaaaatgcagacccttctgggagttgcaatgagaatttctgaaccgattgagcaagtcaagatgcatctctgtgattatatgagttttgagtcctgactgaaggactaggtaaggacttctgtgttgaatatattttcattcgtgtcatcatactggatttctaaagggaata

SEQ ID NO: 3053 - DNA, 348 bp, Lilium asiatic
  unsure (1)..(348): unsure at all n locations
  Clone ID: LIB3229-055-P1-K1-G9
cagaaattctcaaagataatctaatttgtgacaaggtgtttgccacacagcgaggggtcttggattttccgggtccgcanatttcagaatacctcagccaaatgagaatcccaaattttttcgacaaagagagcagaatatgatcgccaagatttggtggatacatgtagtctagctgtgatgagagagtccaagtaatgattgtttatttttggatcagtaattgcctttccttttacctttatgttctattattgatgtcatgtattagttagtaaccttgtatctagatgccagacattttttaatttattaaaatcgtttgacttggattattatactagattg

SEQ ID NO: 3054 - DNA, 361 bp, Lilium asiatic
  unsure (1)..(361): unsure at all n locations
  Clone ID: LIB3229-055-P1-K1-H12
cccacgcgtccggcttattacttagtttatttggaggccttgtgaatatgactgggctaacaattcatgtttattgaaccttgtacattgnacccacagttttgatgaattgaattcccttgctaaaggttacctccagactatatgttatcattcgtgatgcacatgcatatattggtaatatatctttataaatcatatggtattcatcgaataagtaggtgttctctgcttttggctttgtgcacaaaattgcgacctttgagaaagctgcaggttttcaagcattgattcaatactctgatgctgagactgcctcagaggcatggaattctttggacggaagaagcatttcaagata

SEQ ID NO: 3055 - DNA, 73 bp, Lilium asiatic
  unsure (1)..(73): unsure at all n locations
  Clone ID: LIB3229-055-P1-K1-H2
tctagaggattcaagcttacgtacgcctccatgcgacgtgatancttttttgtggtgtgacctaaattcaatt

SEQ ID NO: 3056 - DNA, 420 bp, Lilium asiatic
  Clone ID: LIB3229-055-P1-K1-H3
gactcagcagtgactgaaaacggcgagaattggagtgtcggccaacgacaacttgtctgtgtaggcaggataattttgaaaaagagcaaggttttggttctcgatgaagcaactgcttcagtggataccgctacagatagtctgattcagaaaacgctgaggcagcagttttcagactcgacagtcatcacaatagcccaccggataacatcagttatcagcagcgatatggtcttgcttcttgataatgggctcatcgtggaatacgacacccctaccagattactggagaataggtcgtctttattttcgaaactagtttctgaatacacagtgagatcaagctccaactttatgaactaaataagtgttgaatggagtctgatctgagagaacaatcgtcgattgtgacagctacag

SEQ ID NO: 3057 - DNA, 290 bp, Lilium asiatic
  unsure (1)..(290): unsure at all n locations
  Clone ID: LIB3229-055-P1-K1-H5
gtgagcgtancacacaaccatataaaagaaaaggctacactcaggacctctctcgcactgggaatcaatcgtttgttgtaggatctcaaggcccaaggggatgagagcattattgttactctggtcccccggatgggtacggtgaaggtgggaagcgtttcaatagaattagattcttgagagacatggtagttcttgcttaagttgtgttgtccttggaataaacttattgttcgtgttttgatttcagtcaatgcagttctaaaatttgtccggtttcaatctttatt

SEQ ID NO: 3058 - DNA, 317 bp, Lilium asiatic
  unsure (1)..(317): unsure at all n locations
  Clone ID: LIB3229-055-P1-K1-H6
cgcgtccgcccacgcgtccggaattctgaaagcataccgaacttaccatattcacttaaattgcttggcgaatcgacttatcggtttgaattganagcttattgctggtctaactggctagttgtttatacttggtgttaatatttcattttgttgtagtttcttagctttttccttaagattatattttgttgtagtttcttagctttttccttaagattatatgttgctgtaatcatcagaaaatggaattggaagcctaaacaattaagtcaaatactatttattggtactgttgctgtgatcatcanaaaatg

SEQ ID NO: 3059 - DNA, 376 bp, Lilium asiatic
  unsure (1)..(376): unsure at all n locations
  Clone ID: LIB3229-055-P1-K1-H8
ggaatggtcacacttttagctattgatggggtccctggtctgcanatttgcagggaaaaagatagccaaccacagctctgggaagatgtgcctcatgtccatggggctttcatcattaatgttggggatatactagagaggtggactaatggcttgttccggtcaacaatgcatagagttttaccattacaagagcgctattcagttgcattctttttggatccaaatgctgattgcgtggttgagtgcctggaaagttgttgcagtgcggcatctctgccaagctntcctcccataaagagcttcgagtacataatggagcgcctaagggtttctaactcttcggaaaaataacgacaacaatacattgcatgat

SEQ ID NO: 3060 - DNA, 308 bp, Lilium asiatic
  Clone ID: LIB3229-055-P1-K1-H9
gcgcgggttgttagatgaacacgtgggtgctggcattcttacggctaaaactcactggcgtgattattgtaccaaggtcaaggattcaccaccgtatctggctgtatcatcaaacacatcaggttcaacgccaaaagatctatttgatgatattgcagaggaacttgagaaacagtaccatgatgacaaggcccaagttaaggatgcaatgaagaccgacaaaattgttctgtcattaacatggacagttgaagacctaaaggccgctgttacgaatgaagacagtctgaaaggaatatctgagataa

SEQ ID NO: 3061 - DNA, 296 bp, Lilium asiatic
  Clone ID: LIB3229-056-P1-K1-A1
cgattgtgatggcagtggcaaagcagacggtgattgtcagcgtcgtcatcgctcgcaccgtgccgccgttgccgattccggtgacggccaaagtcaggtactcgtcggcctacgtattcttcattgtcaccaatggcattgtatgtggctactccgtcctctcgctagtaatctcatctggtaacaagggacgcagacagggcctggcattactgatcaccgtaatggacatcgtcgtggctgtccttctcttttcatccctcggggcaacaaggggccgtcgaattgttggggag

SEQ ID NO: 3062 - DNA, 338 bp, Lilium asiatic
  Clone ID: LIB3229-056-P1-K1-A10
atttttatcaatgttccatggtggtacctggcttacaaccgggtgatcagctcggttttcactccgcgatccaagagcaagtttgtgttcgcagggccgtcaaggtcgactgagaccttgttcaaatacatagcccccgagcatgtgccagttcagtacggtggcctcagcaaggatgattctgatttcacgactgctgatgcggcgaccgatgtcacaattaagccggctagcaagcatactattgaaattgaggcaactgagggatcgctttttgtgtggaagctccgtgtgctcggatggaaggtgggttatggggcaaagtttgggcctagcac

SEQ ID NO: 3063 - DNA, 417 bp, Lilium asiatic
  Clone ID: LIB3229-056-P1-K1-A12
cccacgcgtccgcccacgcgtccggaaatagtcagcacgcatggatattcgcagaaccaaattatggtttggaagtatccaactatgggaaaggttgcaactctaactggtcacaccctgcgggtactctatcttgccacttcacctgatggacagactatcgtgactggcgcaggagacgagacgctgagattctggaacattttcccttctgcaaaggcgcccacaccggctcgagacaacgggatgtggtctatggggcgaagctgcattcggtgacaagatcagttctttaagctcgaaatcggaactttctaattctgatttttttatcttgtgcttttctttttttttttagaaactttgggtgtgtggacatagttggtgaaattagggccatttcaaatgatggtagtg

SEQ ID NO: 3064 - DNA, 72 bp, Lilium asiatic
  Clone ID: LIB3229-056-P1-K1-A7
tctagattatcctagcttacctacgcgtgcatgcggcggggtacctcttttattgtgtcggctaaattcaat

SEQ ID NO: 3065 - DNA, 409 bp, Lilium asiatic
  Clone ID: LIB3229-056-P1-K1-A8
acgtccacgcgtgcggttgatcatgcatgcacgaaggcggagatggacggctgtgatgatgtgaatgttctaggggcagatgatcaagcagaagagatgcacatgcaaacagaccggatcgagaaccacgagatcaagcaccgatgattgatggctctgatgaagtgaagttctgatcagacggcgaatagggaggacgcgcatgaacactctagaagcttgcgtgagaggagatcaccattgcatgtgcatgcatggctctcgcagaacaaagaatgccaagcataagacgagatctatcaaggcctaaggaccagcgatgaaggtcctaaagtctgatacgaagaagttcaccatttctttgagcctccttcatgcaggaactctgcttagtgacagaatcgagttc

SEQ ID NO: 3066 - DNA, 310 bp, Lilium asiatic
  Clone ID: LIB3229-056-P1-K1-A9
tccggcggacgttgaagcgttgatgtagcagcgaggtatgtagaagtaagcaagaagggaacgcccgtgaagagagaagttatgagtggttctgtgcaacggtcactcaagggaggtgcttcggtgataatggttgaagaaggtttgtggtttactgacacatgtggtatgattcttccttgactgttctggtcaccgggtgaagtattggaatggactggccaaacatggatgaggaattatgaaaggcccaaagcgctggaaggaactccagcattgtgctggttaccatgtcaaagcaacgaagacc

SEQ ID NO: 3067 - DNA, 285 bp, Lilium asiatic
  unsure (1)..(285): unsure at all n locations
  Clone ID: LIB3229-056-P1-K1-B1
gggtcgcacccacgccgtccggctgcancctggtnnggtggttcctcccttgtgctactctttttggtgggcggtagcaacgtgatgggantttctatgcgtgcgttagaactgcaccaagtgattgcagatttctagttgaagagttgcttaatcatgtaatatatacctaaggccgaggccagaaacttctgccccttggttggtgatttgtgttctctatttttctgaaaaatctttgcaagctcttgctgttcggcctattattagattctgtttctgatt

SEQ ID NO: 3068 - DNA, 319 bp, Lilium asiatic
  unsure (1)..(319): unsure at all n locations
  Clone ID: LIB3229-056-P1-K1-B10
ggacagtggagcagcccatcatgggtggctccactgtgtcctcagcttcaccaccgccgccgagacagagatccggcggaggccgtaccaccgttactgcggctgtgcgctgcaccagtctgaccgtactgtgtctcgcgatgcatcctgcaggctcaccaagatctcgtttccgatcagcgagctgcggagagcgaagcctttaacttgcttatcgcaagacagatgtcccatatcaaaatcttattttagaccaacagtagataggtgagatgtatttaattcaaaattttattattcaaaattntattattaattc

SEQ ID NO: 3069 - DNA, 408 bp, Lilium asiatic
  Clone ID: LIB3229-056-P1-K1-B11
gcgctctgctcctccgaccctcacctcaacttttctccactttctccctgaccggccgaccagctccgtcgctggcccaactgctccgcccctgcctccaagactcccagcagagctcaaccaccgcgccagcagtctccatcctcttggaccacctcccagagaagaagagcagcatgcaatccaagccgtcgactccatgatcaatgatcacaagcgcctccttctctctctctatctcatttgctttgttttagaatttgatcctgtgcttacaagtgtctcccccctgcaggagttacgtgatgaacggcgaggattgcgtgcatgaaaggagaccgagaacaaggaggtcaagcaccagtgatggatggctctgatagcagaagcgatggatggctctgatga

SEQ ID NO: 3070 - DNA, 373 bp, Lilium asiatic
  Clone ID: LIB3229-056-P1-K1-B2
aaccccaaaccctaacccgagagagaaagagatggctgaagctggcggcgctccggcgggcagtggcggtgctagcggtggcgcatcccttaaggaccagggcaacgcgctcttcaaggcggggaactacctcaaggccgccgcgctctatactcaggcgatcaagctcgacccctccaaccccaccctctacagcaaccgatctgcagcatttcttaatctggtcaaactcaataaagcacttgccgatgcggagaaaacaataagtttaaacccacaatgggataagggtcatttcaggaagggatgtgttttggaagcaatggagcgttatgatgatgccgtggctgcattccaagtttctcgtcagtat

SEQ ID NO: 3071 - DNA, 399 bp, Lilium asiatic
  unsure (1)..(399): unsure at all n locations
  Clone ID: LIB3229-056-P1-K1-B4
aaggaatgctgcacaaaggaagttactagatgaactgggcatacctgctgatgatgtaccggtcgatgagttcactcctctcggtcgcattctgtacaaagctccctcggatggaaagtggggagagcatgagcttgattatctgctcttcatcgtccacgatgttaaactgcatccaaaccctgatgaagttgctgatgtgaagtatgtgaaccggggtgaattgaaagaacttctgaggaaggctgatgctggcgaggatggcgtaaaactatcaccctggttcaggctggttgtggataacttcctgctaaaatggtgggaccatgtcgagactggcactctnctggaggttgctgacatgaaaaccatccataagctgtgacatgaaagctactg

SEQ ID NO: 3072 - DNA, 362 bp, Lilium asiatic
  unsure (1)..(362): unsure at all n locations
  Clone ID: LIB3229-056-P1-K1-B5
ggaatnncccgggtgcgacgccacgccgnntccgcccaagcatggattgaaacttcgtcaccaatgtatgtagattggctgcaggactctcaaaggagcgatgtggatcannagcctgtgtgtctgcggtgggagaagtatctngacgaggaagnaaccatcttccacttcannacccgtctggcccgctttgtgaattggaagggcnncccatggtgatgcttgggctcaaccggccgcanagattatttattggacacctaatggtggctggggagcttcatggtggtggtcgccttctctggtaaggatcctactaaggtcgaccgtagtggtgcctacattggaaggcaggcagttaa

SEQ ID NO: 3073 - DNA, 52 bp, Lilium asiatic
  Clone ID: LIB3229-056-P1-K1-B6
gttgaagatgctactacggtgaccactaatgtggaggctatagttgctgatg

SEQ ID NO: 3074 - DNA, 326 bp, Lilium asiatic
  Clone ID: LIB3229-056-P1-K1-B9
gtgatagtggctggagaccatgctaaggtatccaaggatcttgaggaacgcgcagagctgaagaaaatgtgtggtctcattgaagaatacaaactggatggacatattcgatggatatctgcccagatgaaccgtgtccgcaatggtgagctgtatcgctacattgcagattgcaaaggggcatttgtacagcctgcattctacgaagctttcggacttactgttgtggagtccatgacttgtggtctacccacatttgctactttgcacggaagacctggggagatcatagtggacggtgtctcccgcttccacatcgatcccta

SEQ ID NO: 3075 - DNA, 414 bp, Lilium asiatic
  unsure (1)..(414): unsure at all n locations
  Clone ID: LIB3229-056-P1-K1-C10
caaatacctcctcccctctttttaactaaaatattcgatacgcacccaagggtgggaagaaaccggtgtgtggggaggaagccgtacaaggaggagaagaagtcggtccctgcaaagaagaagttcaagacagccaagaaggtgccgacctctaacgagggggcctatgacaagaagaagacgtcgaagaagtcagtggagacctacaagatctacatctttaacgagctgaagcacatccaccctgacatctgaatctccagcaaggccatggcgatcatgaacagcttcatcaatgacctctctcagaagatggcacacgagtgccaccgccttgcccgctacaacaagaagaacaccatcacctnccgggagattcagacctgcgtccgcctcgtactccctggagagctc

SEQ ID NO: 3076 - DNA, 409 bp, Lilium asiatic
  Clone ID: LIB3229-056-P1-K1-C11
ccttaagagcttccacatcatcgtcggtaatggcgacgtgggcactctccgggaggtctccgtcgtctccggcctgtcggccgcgacgagccgggagcggctcgagatcctcgacgacgagtgccacgtcatcagcattctcgtcgtcagcggtgagaaccgactggccaactataggttggtcacgacgctgcatgcggcagcggcggggatggaggtggtggattcgtacatagtggacgtgccaacagggaacacgatggaggagacgaggttgattgtggatactaaagtgtagtgtaatctccagtcgatggcgcacaccgccgagaagatcgccgacgagaggggtgtggtgtaacaatggcgaagaatgaggggctttttaggaaatggagttctagcgtgt

SEQ ID NO: 3077 - DNA, 216 bp, Lilium asiatic
  Clone ID: LIB3229-056-P1-K1-C12
cccacgcgtccgggaaaggcagtttctgttgcctgcatatcagtggtagccactgtgtctggagtagctgagatttcagggaataatctgatagccggcaaggccaacttaaatgacttcaccctcgaattaaagtggagcaatgttggaaactttcatatgtatctgattcagggggtgatgcgacttcttctgaacaccgtggtgatgccatat

SEQ ID NO: 3078 - DNA, 426 bp, Lilium asiatic
  Clone ID: LIB3229-056-P1-K1-C2
aaagcttcaacctctcatcaatcatgtctgggcgaggaaagggagggaagggtctcggcgaaaggcggcgccatgcgccaccgcaaggtgctgcgggacaacatccagggcatcaccaagccggccatccgccgcctggctcgccggggcggagtgaagaggatcaacgaccttatctacgaggagaccagaggcatgctgaagatctttctggagaacgtcatccgcgattccgtgacctacactgagcacgcgcggcgcaagacggtgacggcgatggatgtggtgtatgctctcaagcgccagggccgcaccctctatggcttcgggggttgatctagtactgttctcttctgggtttggtggtctatatctgatttgggttgtttcatatttctgatatgaaatgaaatctcgtcttgaata

SEQ ID NO: 3079 - DNA, 77 bp, Lilium asiatic
  Clone ID: LIB3229-056-P1-K1-C3
acgttctagtggatccaagctaacctacgcgtgcatgcgaggttatagcttttttatggtgcaacataaatacaaga

SEQ ID NO: 3080 - DNA, 383 bp, Lilium asiatic
  Clone ID: LIB3229-056-P1-K1-C4
gctgctcatgcagtgtttgagccctccagcatgatggccaaatgtgaccccaggcatgggaagtatatggctctggtgtgggatgtaccgtggaaatgtagtgcccaaggatgtgaacgctgcggtggccacaattaaaaccaaaaggactgtccaatttgttgactggtgccctactggtttcaagtgtggcatcaaataccagccgccgactgtgggtccctggaggtgatttggcgagggtgcagcgtgcggtctgcatgatcagcaacaacacagctgtggctgaggtattctcacgaattgaccacaagtttgatctgatgtactccaagcgtgcttttgtgcattggtatgtgggtgaaggcatggaagaaagggag

SEQ ID NO: 3081 - DNA, 401 bp, Lilium asiatic
  unsure (1)..(401): unsure at all n locations
  Clone ID: LIB3229-056-P1-K1-C5
gcaaaatttccaccaaatccacctaaatcgcccaccaacaaccgaccaacaagcggcggcgacaatgcttattgagacgcccnctaacatacacaacnagaatatacgcatccatggaggcaaagccggcacatgagctgaaagctggattgcctcgaacgaagtctgtgaagacggcgctgaccgaacagaacgcgttgaggcatctttccaatgccaaagctcaggctgtcccggctccttcgaaagcgaagggcaaatctgcactgaaggacaaatctgcgtttggcgggcttggagccaagaacgctgcaccgaaggtgagcgagcttagtgatgaccacatcgcgaaacatcgtgagtgggcgaaggacgggatcgagtatgtggagttcactggg

SEQ ID NO: 3082 - DNA, 357 bp, Lilium asiatic
  Clone ID: LIB3229-056-P1-K1-C8
ggttgtttgatccatggcccgtgttcttcaggagggagtggaaccgcaaggggcccttcctcaccggcttggccatcaccggcgccctcataaccaagttcaccgacgacctaaccgaggaggacgctaataactcgccgtttctgcaggaacacaagaagtaaactcctatgcattattatgacacctgagctgctctacgtcattgatgacttggctggttatctcttatgctgaaatgagaaattgcttgctaagtacaggactcttacatgtgtgtgggttataataatcaaccaattgatgggtctcaaacttatcccagcttgtcaaatatgaagctctgtttctttcctg

SEQ ID NO: 3083 - DNA, 405 bp, Lilium asiatic
  Clone ID: LIB3229-056-P1-K1-C9
ggaatcttggacagtgaaaacagagtttggccacatgtcaccgtcaaggctggaaatggaactagaatcaggttctggcacgaaacatgggcaactgaggatcctcttaaagtcaaatgtcctcaaatattccagatatgtccaaataaaggggtgattagtgagttcagatatttcagtgtttcacacatggaacttacaattgagaagatcattatttgacaaaaaagtgagtgagaaagagatgcttgtgatccttggaaaagattgaacacaagtctggacaagactgcagtttatggacaaggaaaaaagatgggagtcttcgttgttcaaatcttctacaatgtcataatcacaaacaacaacatgattagacaatgtgtttcccaaatgaagaaaata

SEQ ID NO: 3084 - DNA, 297 bp, Lilium asiatic
  Clone ID: LIB3229-056-P1-K1-D1
ggggcggcgccacgcgtccgcccacgcgtccgagataagggaggatataaagttataagcacttctggaaatgaaagcgggggggaggaaagttgttggtgcgagggacaaaaaagccataaatccgctttctgttaaaaaagcaaatgatgacatctttattaaattgggttccgacaagggcactggaaagaagaaagaaaatactgagcgggaaggagggaaaaagccattgagtatcaatgaatttctgaagccaactgatggagaacggtactttggtgggcgtagccgtgg

SEQ ID NO: 3085 - DNA, 375 bp, Lilium asiatic
  unsure (1)..(375): unsure at all n locations
  Clone ID: LIB3229-056-P1-K1-D10
ccctaaataacaaccagaacctttttattcacaactccaatgctccccggggaggaaaccctccgtatttgtcggctgcatanangacccactgattcatccgacaattctccacttgcatcataaacattgcttaacactaccacatcacattaataacaataaactgctataattcctctagaaatcctcccaacaaagctaccaatagatgctcacttgaaaacatcctttctccggacaaggatagttacggacgaaattcttatatcccaaaaaattctaaagatcacgaggattaataattctccaagcctaacaccagctattcaaataatagctattgaaatttcaaaaataataaacaatattcaa

SEQ ID NO: 3086 - DNA, 416 bp, Lilium asiatic
  Clone ID: LIB3229-056-P1-K1-D11
cccacgcgtccggcaaaggacagctcctacctccttcctcaaacattcccgttcgcggctgatccgtatgggtggagccagacaagggaaagatgggtaggggtaagatagagatcaagaggatcgagaacaccaccaacaggcaggtcaccttctgcaagcgccgcaatggcctgctcaagaaggcctatgagctctcggtgttgtgtgatgcagaggtcgctcttatcgtcttctccacccgcggccgtctctatgagtatgccaacaatagtgtgaaagggactatcgaacggtataagaaagcaagcagtgatgcgtttaataccggatctgtctcggaagctaatgcacagtactaccaacaagaatcatccaaactgcgtaaccaaattgttagcttgcaaaatgcgcac

SEQ ID NO: 3087 - DNA, 415 bp, Lilium asiatic
  Clone ID: LIB3229-056-P1-K1-D12
gatttattgaagtctatgaaatctaggtttgagtcaatgagcgaggagaaacagcgtagaatgcaaagtgtgatgccgctcaccgaagccatgtacgagtatggaaggagaaattaccagaaagtgtttgatatacttggtcctgattttgatgccataaactatagagtatgatcacacattatgtactcttgaaatttaatcccttcaggaaaatattacttttttatttatttgtcagatgattggagcctctggtgagcaacttgatgttttcaatgaattttggtatgatgtgttgttgtgcactagacatacgtcgaaggctatcgaattgctacagaaacaagtgacgataagggaagggatcccttttctctggcgcttattggagaaggcctatttgatggaaggg

SEQ ID NO: 3088 - DNA, 421 bp, Lilium asiatic
  Clone ID: LIB3229-056-P1-K1-D2
cccacgcgtccgatcccataggaccggcaaaagaacttgttgaaaagccatttggtgagacaattgcaagggcacgtaagacctggtggtgttctttgtaatcaagctgagagcatgtggcttcatacacatcttattcaggatatgctctctatatgtcgtgaaacctttaagggttctgttcgatatgcgtggacaagtgttccaacctatcctagtggtgtgattggatttttgttgtgctcgacggatggtcctcctgtcgacttcttaaatccagtaaacccaattgagaagctggaaggagcaatcaagtctgggagggacatcaggttctataactcagagatacataaatctgcatttgccttgccatcatttgcaaagagggagctggcggccttttatccttcagcaacag

SEQ ID NO: 3089 - DNA, 239 bp, Lilium asiatic
  Clone ID: LIB3229-056-P1-K1-D3
gtttgacaaatatcttgtgcaataacatgaatttattggaccttcgaaaaaaacatgagtttattggcaatcttgaccggtcataggggagaaaactatttcttgacattaggattcttatagaattctttaaaaagtttagtatgctgaggaaaaggggaaagttggttagcatctatatgcacaatcattaggcgagtaacgacaacggaaacttggcaggtgcagaagaacaaagc

SEQ ID NO: 3090 - DNA, 177 bp, Lilium asiatic
  unsure (1)..(177): unsure at all n locations
  Clone ID: LIB3229-056-P1-K1-D5
accacacatccctatttctacaactttatcttccaccctaaaaaatccaaaccgccgcgcacaaacatacttcgcccgagcaaaaaaaaanacaccaaaattcaatccactaacccactacaacaacaacaaaccgacaaaaccctaacattacccaacctaatcaccaaacaaaac

SEQ ID NO: 3091 - DNA, 407 bp, Lilium asiatic
  Clone ID: LIB3229-056-P1-K1-D6
tgcaaaagaaattaaattgcaaccatttagtgctacaactttaaagttggaactgttgctgaatgaaacggatctgatgggaatggcctatgtgctgaggagtactccctcactcgagtctcttgttctacaattacacactggtgcctgtccaataccaccggagcggtgggactcgttcttttatcggaactttgccgatccctgggaattgctggagcgttctttgtctaccgttcagaaactcaagactgtgaagataaataactttctacgaagcaagtcttatttgcttcgcaaaaagccagagcggagtctcagtaccaacagatacatccagaagtgcaagaaggaaattaagctagcgaagttgcttctcaacagcttaacgattcttgaggagatga

SEQ ID NO: 3092 - DNA, 136 bp, Lilium asiatic
  Clone ID: LIB3229-056-P1-K1-D7
tttcctgagtcttgaatttcggatctgagacttagaagctctgttttgtagttggctgttgtgatacatgcttgagtaggattttaagatgaattatctcttaaattaaactttgttggtggcgtttgcaataaaa

SEQ ID NO: 3093 - DNA, 388 bp, Lilium asiatic
  Clone ID: LIB3229-056-P1-K1-D8
ctaatttttccagagtgggctgaggtctaaacccttgatgaatttggcccggaagtaacttcaattttgttgtagaatctttccggaaagctaaattttaatggttttccaaaggccaaatgtcctaaaatagtttcaagggatttttgaatattaatttacttttttataaccttatctggagagggacctggagactgcaagatcttttacttttctttttttcactgcacttgtatgatgagatcgtaaattggtgaattgtttcttgcaccaacagttcagaaaaaaattgagcttaaatggaacataaagatgtgtggcttagcgttgttgtagtcttatttagtaaataagaacttcagaaatttctatacagcaaaatctg

SEQ ID NO: 3094 - DNA, 185 bp, Lilium asiatic
  Clone ID: LIB3229-056-P1-K1-E1
agaagattgggacgttctgctgaagatggaagaagaatatatcgagaacatctgtgtgcagatattgaagttcaaacctgacttggttataactgaaaaaggtcttagcgatcttgcatgccattacttcagcaaggctggagtgagtgctatcaggagggtgagaaagaccgacaacaaccgta

SEQ ID NO: 3095 - DNA, 380 bp, Lilium asiatic
  Clone ID: LIB3229-056-P1-K1-E10
cgctggggatgtctgatctgccgggtgtgcagaggcaggttgaagcgccggcgcggccggcgtatgctggaggcggtggcagtgggtttggtggaagtggctttggcggtcgcggcggcggagccaggaactgatgggtagcttcgaactctctgggtttttaggtgaaatggttactatgttgctttactttgtgttgtcttgatctccatttgaacttggtattggagtttttgagtattttgtttgaaatgtctagacttgtttaatttgttgtctcgtgttttttagattgatgttattttggaatttcaattgttaattagttatattctgttgggtattccaaaataacatcaatctaaaaaacctagatcgcg

SEQ ID NO: 3096 - DNA, 414 bp, Lilium asiatic
  Clone ID: LIB3229-056-P1-K1-E11
ctcggcctcccgcctaccgttccgtcacctgccggcgacgttggtggcgagacggagaacttcggtagtggtggggaggtggaagcggttagttacgatcagatctgggggtttggtgacgagatccagccgagcttctatgactttgaggccaggcctgaggccggtgatggcgacgttatttttaacgacgggctgtttgagtatgccgacgtgttctcttcagattactctgatgcaaactggcggacagaatcacttccagcgatctgagaggaggctagcagctgcgtttttcattttgttggtttttttaattttgttctacaaaatgtaaattttaggtagaagaaaagggaagcgagaggaagcgtcagtttttgaccttctttcgtttctctagggcgccgaatg

SEQ ID NO: 3097 - DNA, 462 bp, Lilium asiatic
  unsure (1)..(462): unsure at all n locations
  Clone ID: LIB3229-056-P1-K1-E12
gaccctacgccgtccgcaacaatatctgctcccagtatgtggttctattgttctctcgcgactgggaccccatgcgggggagggagctggcatgtgtttgttgtgggcgaatgacaaagggtgaaggtagttggtagcacatgcatgccatgtcgcacagcgctgtgaagatggcatgttgtcatggatgcaaatatcagtcttcgtcgngaatgatgacacacggaccaaatacttaactatatcaatcagctttgtgagcgcttacctagtcctatgggagaatcagctgttgactgtgctagtcttgacacgatgcctaatgtctcattttcaattggtggcaaaacttttgagctgacaccagaacagtacataatgaaggttggtgagcgacctgcagctcaatgcattagtggattcacagctatggatgtaccgcctgctcgtggtcccctttgg

SEQ ID NO: 3098 - DNA, 264 bp, Lilium asiatic
  Clone ID: LIB3229-056-P1-K1-E2
ctcccttgattatttggaccttctttggtgaacaatgaactcagatgaagctaggagggtgaaccccttagtgtggtccaggaaatgaggaaattgtccaaatctcttggctagtttacttcttctaaagatcttattataaaaaaaatatttgagcattccaaatgagatagatatacttttttatcactaaaagcattgtggccggtttttgttaaagaaaaataattttaaagttcttctttcatttgcctaaccttaatt

SEQ ID NO: 3099 - DNA, 420 bp, Lilium asiatic
  Clone ID: LIB3229-056-P1-K1-E4
attcgccgtcacacagagagcggacgatctcgaaaccctaaaccgatctccggttctggccgcccctggcctgctggtggatggtcaaccccggcgaggaaaaggttgatgagggattttaagcggctgcagaatgatcctcctgccgggatcagcggagccccgcatgacagcaacatcatgttgtggaacgcggttatcttcgggcctgatgataccccttgggatggaggtacgtttaaattgacactccagttcatcgaggattatccgaataagccgccgactgtgcgctttgtttctcgaatgttccatccaaacatttatgcagatggaagcatttgtttggatatactacagaatcagtggagccctatctatgatgttgctgctatccttacatccatccagagttggaca

SEQ ID NO: 3100 - DNA, 404 bp, Lilium asiatic
  unsure (1)..(404): unsure at all n locations
  Clone ID: LIB3229-056-P1-K1-E5
atgcaatatgggatgccggtcatttgttcgaccacaggtggtcttgtanacacaggcagggaaggattcactggagtcgacatggacgccttcactgttaattgtgaagctattgatccagtggatgtggtggcgactgttaaaactgtgaagaaggctcttaaggtctatggaactcctgctttcagcgaaatggttcagaattgcatggctcaagacctttcatggaagggacctgcgaagaagtgggaagaattgctcctcgatctaggagtccatggcagcgaaccagggattgacggagaggaaatcgctcctatgtccaaggaaaatgtggcaactccgtgatcgcgatgtttgcgctaccctagcaccatgttatgttatgacattcttgagtgatc

SEQ ID NO: 3101 - DNA, 75 bp, Lilium asiatic
  Clone ID: LIB3229-056-P1-K1-E6
gctattggtaattttgagtaacccaattttatgagcttaattggggaccaatataaaggtttttttgggggtggg

SEQ ID NO: 3102 - DNA, 312 bp, Lilium asiatic
  unsure (1)..(312): unsure at all n locations
  Clone ID: LIB3229-056-P1-K1-E7
aaccaaaatgggaacagccttatccccccttcccttccgctccatcccctgctcgcatgcggttctacgtgtgcggcctaggctcaccatccgacccctcaaaatccgccgacctcccaacgcgaccgtcataaccggccggatctccacttcgaagtgggccgcgaggagcagcttggcgccgccgaaggagccggacttcgatgtgaagaagttcatcaagttcctgtacgaggatctcccccacctttttgacgagcaaggaattgataagacgatgtacgacgaccgcgtnccgtaccgcgatccgat

SEQ ID NO: 3103 - DNA, 417 bp, Lilium asiatic
  Clone ID: LIB3229-056-P1-K1-E8
ccacgcgtccgaaggctgcagtatgagcaagggagtgaatataccgacatttatgaatgccaaagaatgtttggtgtgtctacaaagatcagtggaggagattcaccagaaaaagttgtttccatacaacccaaaacctcttctcagcagattatcaagatttcaggagctctgcgagcatgaggaatgtggtgccagacatcacaggtgatgtgttatgtgttaagtcctcgctagaggtgctcttcgtctggtagtaggctagttatggttccacttgaaggcaacctctgagattttaaagaaaccttgacggtacctcctcagttcaagttatccatcataaagttgccctcgtcattgcgtatttgacactcattgcttgcttggtcatgtttgttacggaaaaagtaatac

SEQ ID NO: 3104 - DNA, 325 bp, Lilium asiatic
  unsure (1)..(325): unsure at all n locations
  Clone ID: LIB3229-056-P1-K1-E9
gaaccctcgcgcatatccctattacgtacttggagtctcgtgaaataagggccggacgtccgtgtgtctgtgtaggtgtatcaatacgaggagtgtcatggaataagggctttttaagtccgagtgtttgctatgtatatcagtgcgtggagtgtcttaaaataagagctttatgtttatttgtgttttgctgtgtgaatcagtgtacgtcgagatggaaaataatgtttaatggtagttttatctctaactcaaaatttcaactntaagtttacatttgtttttgttagtatggttctctagaatttaattcaatattgggctt

SEQ ID NO: 3105 - DNA, 379 bp, Lilium asiatic
  unsure (1)..(379): unsure at all n locations
  Clone ID: LIB3229-056-P1-K1-F1
attactgctgcaggaaagcgtgagaagcttcttaatgtgataaaaaatcctnggactgggcacttacctgttttgtcgcgaaaaatangtctttcctatagttcagaaaaagttgttcaattgcgggattatgttgcagttgctagtgatgatgtcagcctagtttttgtggttggtgctatggcccatgggaaaattgacaaggaatacacagatgattttatatccatttcaaattaccctctgagtgcagcatgctgcattggcccgatatgcaattcttttgaacagaaatggaaaattatatagatcttatcgggctctctttcgccttgtaacctatacatgacctttttctcactaatgagctggatttgta

SEQ ID NO: 3106 - DNA, 262 bp, Lilium asiatic
  unsure (1)..(262): unsure at all n locations
  Clone ID: LIB3229-056-P1-K1-F10
aactccaacccccacccaaacccacccacccacccaaacacccccccgccaaaaaaaaaaactgcccgccaaaaacaaaanncaanaaaanacaccccccaaccaacaacaanacaaccaaaaacacccccccaccacacaaactatacacacacacaccaacaaaaccacaaacacacaacacacaaataaaacaacacacaaccacctacaaaccaaccaatcatccacaacaaccaacaccacgacccaccaaacaaac

SEQ ID NO: 3107 - DNA, 417 bp, Lilium asiatic
  Clone ID: LIB3229-056-P1-K1-F11
cggacgcgtgggtgcaaggtgcttgttaacatagagcagcagtctcctggcgatggcccagggtgtgcatgggcagttcactaagcgcccggaggagattggtgctggtgaccagggacacatgtttggatatgccacagatgagaccccagagctcatgcctctgactcatgtccttgcaaccaagctcggtgctcgcctaactgaggtacgcaagaatgggacctgcccttggctgaggcccgatggaaagacccaggtgacaattgagtatcagaatgaccatggtgccatggtgccaattcgtgtccacaccatcctcatctccacccagcatgatgaaaccgtcaccaatgatgagattgctgcagacctcaaggagcatgtgatcaagcctgttgtccctgagaagtatct

SEQ ID NO: 3108 - DNA, 355 bp, Lilium asiatic
  Clone ID: LIB3229-056-P1-K1-F12
cgccgccgccgctgctcgtctccgccgttcgccgccgcatctgccaccatgggtcgcatgcacagtcgtgggaaggggatctcctcctccgccctcccctacaagcgcactccgcccagctggctcaagatctccgcccaggaagttgacgagagcatctgtaagttcgcaaagaaaggcctcaccccttcccagatcggcgtgattctccgtgattctcacggcatcgcccaggtgaagagtgtcaccggaagcaagatactccgaaatcttaaaactcaccgactggccccggagaatcccgaagatctggattaattgatcaaaaaagccgtggccatcccgaagcattttg

SEQ ID NO: 3109 - DNA, 208 bp, Lilium asiatic
  Clone ID: LIB3229-056-P1-K1-F2
ctcgatgtcatcagggggcgtgccaattgagtatgtattactaccactgcaatagtgaggtattccttgcagggttgtgggcttggtgaaatgtttatagttatgtgggatggtggatttactagattaaatgttatgtggttctggtgtgggtcttgtttaacagttgaacttctttggatttttaatatattgtggtatctgttat

SEQ ID NO: 3110 - DNA, 364 bp, Lilium asiatic
  Clone ID: LIB3229-056-P1-K1-F3
cccacgcgtacgcacgaacttcaggataaccacggtcagaaagttaggcaggatgcagagcacccctatgaagttggtggaaagcctcaaatttgaatctgcgattgatatgctgaaggacaacgaaaacatgtcagtcatgaagactgatccgcctccacagagcaatattgaaaaatcagcgaaagcaagttcggtgagacagcctctgcagcgtgttgagaagagcaataatgcacgacaataaagaccttatatggcgcatatttttaactattggttgatgggcttatctgggagttgttgatgttgttgtgtacgtttgtaatgctaagttgtgagcctatatatggctgaatatttt

SEQ ID NO: 3111 - DNA, 417 bp, Lilium asiatic
  unsure (1)..(417): unsure at all n locations
  Clone ID: LIB3229-056-P1-K1-F4
tgaaagagaagtttgagggtctgtgcaaggtcatcaaggaggtgcttggtgataaggttgagaaggttgtgtgtttgtgacgcgtntnnttgattctccttgctgtttggtcacgggtgagtatggatggacggccaacatggagaggattatgaaggcccaagcgctgagggactccagcatggctggttacatgtcaagcaagaagaccatggaaatcaacccggagaactccatcatggaagagctgaggaagcgggctgatgctgacaagaacgacaagtcagtcaaggaccttgtgttgctgctgtttgagactgcactgctcacctctggtttcagcctcgatgagcccaacaccttcggcaacaggattcaccgcatgttgaagcttggcctcaacattgacgatgatga

SEQ ID NO: 3112 - DNA, 306 bp, Lilium asiatic
  unsure (1)..(306): unsure at all n locations
  Clone ID: LIB3229-056-P1-K1-F5
ccacgcgtccggcggggctgagcagtgtcaaccttcttgtatacgtgtactgtgcagntaagtacaagggcaanaangctatttaggtggcgttntttgattgnttgtttatgtaaaacggtgattatgaacggaaaaattatgtatatttgaaaattggattattgaatgatgctactgtatgccctcggaggaaaatgatgcaagtgtatttgtatcgaaactttattttaaatccaaacttggtctgtttattgatcttgtcaaaagctcaggccctaactctagcgggtcgaccagtttaaa

SEQ ID NO: 3113 - DNA, 419 bp, Lilium asiatic
  Clone ID: LIB3229-056-P1-K1-F6
cccacgcgtccgaacgatatgagttggcggtcggggtcaccgctgccactttcggcacggaacaactgttttttgctggtgcgtcctcaccccgccgcccgccgcctcgtcatctcgccggaaaatcaaggagcgctcaacccgtcgccggagatgcctctctccggcatattaatcgaggtttccccgtcgcccttgccggtacgtcatctccggtgatcgccgcagtcgccgccgtgcctagatatatagaacaatttatggtagacaatggaaagtcacttgcatggtacaggttggacctcacaaccctacgaaggtgatatatctacacattttgcaaatgaatcggaacctgaaacagatgctgaaatagaagtcatcattgatgacggggatacagatgaagagtgcaatgt

SEQ ID NO: 3114 - DNA, 417 bp, Lilium asiatic
  unsure (1)..(417): unsure at all n locations
  Clone ID: LIB3229-056-P1-K1-F7
agaatggtgatgctggcatgattaagatgattcccaccaagcctatggtagttgagactttctctgattatccacgcccttggccgatttgctgttagggacatgcgccagactgttgctgttggagtcatcaagagtgtggagaagaaggatcctagtggtgccaaggttaccaagtctgctgtgaaaaagaaatgagggttctgttttcttaatagtagttaagcccagccaatttactgagtttattttgtacttgtcatgcgtcttgtttgtttcgtacttgccatgcgtcttgttttaacaagatgcttgataggttgatgagtttatgtgttgaatttacagtttggtcttattttgtcggtgtcttaaaagtttggacctgatgagttccatgtggtaaatntacagttt

SEQ ID NO: 3115 - DNA, 216 bp, Lilium asiatic
  Clone ID: LIB3229-056-P1-K1-F8
cgtgttcggatcaaagccaagccctaaccgtccggttagccaaaaaaagtctggtgctcgtgcaaattgtttgtgcgtcaaatggaacccccaaccggaggctatccctcaaccctcagggtggcaatggtgtgagattgaccggcaagaatggaaagagagactcgttacctgaacttcaataaaatattttgccattgggaaagaagacacctt

SEQ ID NO: 3116 - DNA, 199 bp, Lilium asiatic
  Clone ID: LIB3229-056-P1-K1-F9
tctagaagatccaagattacgaacgccggcaggcgacgacataagtggtctagagtgtcaccaaaaaacaatacactacccgccgttttacaacaacgtgactgcaaaaacaacgccgtcaccaaacaaaataaccttgtagcacatcatcctttttccagcaggtgtaataacaaagaggacgccaccaatcgtcctt

SEQ ID NO: 3117 - DNA, 322 bp, Lilium asiatic
  Clone ID: LIB3229-056-P1-K1-G1
gggaagaactggtcggagaaatgccactgaagataacttatcctgccattgagagccatgagtggcggattgtgacgggctgcgacccaaaaaataccagatggagttaccataatggaggatcttggccagtgctcctgtggctgatcaccgcagccagtatcaagacaggtcggccgcagattgccaggcgcttgatagacctcgctgagagccgactgttgaaagatagctggccagagtactacgacgggaagctgggacggtatatcggcaaacaagccaggaagtaccagacatggtccatagccggatatttggt

SEQ ID NO: 3118 - DNA, 406 bp, Lilium asiatic
  Clone ID: LIB3229-056-P1-K1-G10
gctggaacggtcgaagctgcaaaatggttgcacaaggctgtcaatcgcccggatgcctatataaagattcgggctactgcagaatgtgttccttctattaaggaagttatctcacttggaatcagcgtcaatgtgaccttgatcttctcgctctcgagatatgaggcagttattgatgcttatttggacggtctcgagtcttctgggctgagcgatctgtctaaggtcacgagtgttgcgtcctttttttgtcagtcgagttgatacccttgttgacaagatgcttgaaaagatagggacacctgaagccctgaatctccgtggaaaggctgcagtagctcaggcagcgctggcatataagctctaccaaaagaaattttctggtccacgatgggaggctctaaag

SEQ ID NO: 3119 - DNA, 408 bp, Lilium asiatic
  Clone ID: LIB3229-056-P1-K1-G11
gggagggaaggggctcggcaagggcggcgccaagcgccaccggaaggtgctccgggacaacatccagggcgtgacgcaagcctgccatccgccgcctggctcgccggggcggagtgaagaggatcagcggcctcatctacgaggagacccgaggcgtgctgaaaatctttctcgaaaatgtcatccgcgatgccgtgacctacaccgagcatgcgcgccgcaagactgtgacggcgatggatgtggtgtatgctctcaagcgccagggccgcaccctctatggctttgggggttgatctagcactgttctctcttgggtctctgtttgtttattttcggtttggatggtaagtctgttcttcatatttctcgtatgaaatgagatggaaatggaaatttgggttgtcg

SEQ ID NO: 3120 - DNA, 415 bp, Lilium asiatic
  Clone ID: LIB3229-056-P1-K1-G12
cggacgcgtgggcagccgagagaggagagagcagcaatggtgcagcgcctgacctaccggaagcgccacagctatgccaccaagtcgaatcagacgagggtcgtcaagaccccaggtgggaagctggtgtaccagaacactaacaagagggctagcggaccgaagtgtccggtgactgggaagaggattcaggggattcctcacctgaggcctactcagtacaagaggtctaggttggctaggaatcggaggactgtgaatcgtgcttatggaggggtgctctctggcagtgctgtgagggaaaggattattcgtgcctttcttcttgaggagcagaagattgtgaagaaagtcttgaagatccagaagactaaagagaagaccaccaaaacttaagtatgggagttgaatttga

SEQ ID NO: 3121 - DNA, 196 bp, Lilium asiatic
  unsure (1)..(196): unsure at all n locations
  Clone ID: LIB3229-056-P1-K1-G2
tcaaataactttgaaaaataatgatcctcataaagacaaacccttcactngatcggcgggattgccccatattgtgtaggcgctaaaaccaaagtctgcatgcttgatgatcctcaacatgttaacgaggcaaaaaaaatcgtatcagactatatcgatcttgaacgactcaagaacatcaacaaaaacaagaaac

SEQ ID NO: 3122 - DNA, 306 bp, Lilium asiatic
  Clone ID: LIB3229-056-P1-K1-G3
ccgctgttgactcatcaactatcgccggtgccggcgagctcaccggagtccccacgatgagcgaatctaactttgcgggagctaagaatacctgaaagccgtcgagaagtgcaagaagaagctccgtggcttcatcgccgagaaaaactgcgcccccctcatactccgcctcgcctggcacgcggcggggacttatgatgtgaagacgaagaccgggggtccgtttgggactattaagcacccggcggagctcgcgcatggggcgaacaacgggcttgttattgctgttcggcttctcgagccgat

SEQ ID NO: 3123 - DNA, 325 bp, Lilium asiatic
  unsure (1)..(325): unsure at all n locations
  Clone ID: LIB3229-056-P1-K1-G4
tcatattcttntactctccgctagggatggcattgtcgcggttggcggcccttacattccactcaagacctgcaggagagatgggaggagaagcagagccgagctgctggagcactacctccctgaccacaacgagagcatctcgtccgtacttgacaagttcggcgccatgggcatcgacaccgccggtgtggttgccctcttaggcgcccacagtgttgggcggacgcactgcgtgaagctcgtgcaccgtctctacccggaagtagacccagagctgaacccggaccatgtaccacacatgtttgaagaagtgtcacactga

SEQ ID NO: 3124 - DNA, 420 bp, Lilium asiatic
  Clone ID: LIB3229-056-P1-K1-G6
ccataatagccggggcaatggaggatctgtaatcggtgctacgactcctggtcagtgacggtgagcagacaggtgtgtgggagagcagcctcctggccctcgcatgccagatggtaccaggggattcaacgtgggcagagggaagccgcttaattcgggtaccggtaccgcagcttgatgggaccttcggtatggctcgttggtgggttcttggtaggggtcttcttagatgatgtcatattagccgtaaacatgttgatttaatttggagttgtgggattggtagtgttgcaccctagttgggagtgtttgtgttatgatgtctgtttcaatatttggcccttaatttgttgtcttcgtcatgttagctgacttttgtcttgtaaagaaagaaaaggtggggaacaacccgtggggaga

SEQ ID NO: 3125 - DNA, 332 bp, Lilium asiatic
  unsure (1)..(332): unsure at all n locations
  Clone ID: LIB3229-056-P1-K1-G7
cactgctgaaaacttcgctaatgccaccggtgagcagggatacccgggaggcagggtcttcgacccattagggtgtgcggagacnttgcanaacggggtttatgtgccggacaacgagaagctcgagaggctgaagttggccgagatcaaacatgctcgcttggctatggttgctatgcttatcttttactttgaggctggacaggggaagacaccccttggtgccctaggtttgtaatttatgggtctttgaagagcttgtaaacattntagatttaatgacgatggtaatctttgttgtaaagtatgtgttgaggtattaacaaannaaa

SEQ ID NO: 3126 - DNA, 287 bp, Lilium asiatic
  Clone ID: LIB3229-056-P1-K1-G8
ggtcggtagtaatatagatgagatggtatcccagatccatgacagtgtacttaagatagtactcgaaacaaacacatgacgagttttctgatcacaaacaaaacatgatataacaaaatccaaatatatctgagatactgataaattcgtcggatcaatcaacctcttgcagagacggggcaccggaggcggcagcagcggcaacctcatcggcggagaacttccccttcgccttatccgcagcacgaccgcgagctttccggtcaagcagcgccttccgatccttg

SEQ ID NO: 3127 - DNA, 412 bp, Lilium asiatic
  Clone ID: LIB3229-056-P1-K1-H10
cggacgcgtgggcggacgcgtgggcggacgcgtgggcgcgaggaaacatgctgggctaccaagatctgatgtgccggtgatgagctcctctctgattcatttccctacactgagattgaaaatggtatgctgtgggaggtggaagggaagtgggttgtccaaggagccctcaatgtagatattggtgcaaatccctcagctgaaggtggtgaagatgatgaaggggttgatgaccaggccgtaaaggtggttgatattgttgacaccttccggcttcaggagcaacctgctttcgacaagaagcagtttatggcatacatgaagcggtatgtcaagcagttgacgcctaaacttgatgccgagcagcaggtgctatttaagaagcacattgagggggccattaagtttctgc

SEQ ID NO: 3128 - DNA, 369 bp, Lilium asiatic
  unsure (1)..(369): unsure at all n locations
  Clone ID: LIB3229-056-P1-K1-H11
ggaatgggccgggtgcgaccctacgcgtccgccacgcccgtccggttctctttgctcgccgccctctttgcctctgcccgctgtcgcgcgtgtgcttgatcttgtgtgtgtggtgagaggcnnataacgatgaaattaaaccttgtgaagatggaattcggtaagtgattgcatctcataaagctcccgctctttatcntctatacatnnctcctgccaagtgatggaagggcagaatcggagggcatgcatgcactgtagactgatgtctaattcttttggaacaaagaatctatcctcttaccaatgatagcaaggcagcttcaataacttgttggctaagcatgctgagggaaggagagactgact

SEQ ID NO: 3129 - DNA, 143 bp, Lilium asiatic
  Clone ID: LIB3229-056-P1-K1-H3
acaactacaacacccccacaacccaaaccctacccaaccccaactccatccactacaaccacattcccccaactaccacaatcccaaaaacgcccacacccacccccatcacccacaccaacaacacctcaacctcaaatcaa

SEQ ID NO: 3130 - DNA, 354 bp, Lilium asiatic
  unsure (1)..(354): unsure at all n locations
  Clone ID: LIB3229-056-P1-K1-H5
cggaactcggaagtggcccgcgccacgcgtccgactctgcttccaggacctgcgtggtgccttctgagcgatatctgttgtctggtggcaagctgtagcgaataatgtggagtgactacanaaatatcgagagtcagacgtgtctgctgtgaatctgtgatgttgtttcgccagtctttatcttatgcattatgtctttattctctcctgttgctctagcttatgcaattacctttgttaacacttatgtttaaattctcgcaactgattctctggttcgacatcgcagtttaactgcaactgctgttcgctgattattcagtaattaactatgcatatcattgattggtctaa

SEQ ID NO: 3131 - DNA, 431 bp, Lilium asiatic
  unsure (1)..(431): unsure at all n locations
  Clone ID: LIB3229-056-P1-K1-H6
cggaatcgcccgggtccgacccacggcgtacgctactgctcttgtcgccctttatgtacttatttcggattgtctactgtgctaggaattttgcgagaaagcggttcggatttgtgtggcgagagatgagcnngaaaggatnctaaagctcaagaaacggaaaagaagaatcgttgcaatcnnttgatgaggatgtgccctcttggatctatnaagtaccccctccttcccccattcggaattgaggtaagaaaggtctcacttccggcctcgagntgggggaagggcacaaattgttggccgtcttttctcttcggttttggaggaggcacattgnggagagcatctacatgtgatttcggagtggagagttcatcatgggtcttgtttgtggatctttgttgagctttgagagagtcatgtaaatggag

SEQ ID NO: 3132 - DNA, 323 bp, Lilium asiatic
  Clone ID: LIB3229-056-P1-K1-H7
cggacgcgtgggcggacgcgtgggccgaggcacataaacagtcgcttcccaagctgatactcgttgatgtggtcgtggcggataaatgaagtggcggtaaggggattgatcatcggtaaattcagccagcacatgagttgtttctctcacaccttggctttctctccacgttgataactcaatctactacttaactctgattgtttattgctttgtgtatttatttatgttatttattggttgtgtaagttatgtttgcggttggatattcccaatacatagtctgatcatagttaaacattttaacttaaaaccctctcgta

SEQ ID NO: 3133 - DNA, 412 bp, Lilium asiatic
  Clone ID: LIB3229-056-P1-K1-H9
gactttctgaacgaacatctactataaaaaaagtaacaaaaatggatagggctgggggaatgaacgctttcgttaggtttttaaacacaaatggttgggttgttcggaatgaacctctatcataattttttcataaaaatgattggatgtttcgaacaaatgtgtaacaaaaatttctacacaaaaagatagcacattaggactaccataaattttttcactaaaacttatagcttgttgggaacgagcgcctaccataaattttttcataaaaaattaattgaacgttcagaacgaacacctaccataattttttttcacaaaaatgatagaaagtttggaatgaatgtctaccataaatattttcacaaaaatgatataaagtttggaatgaatgcttaccataaaattt

SEQ ID NO: 3134 - DNA, 171 bp, Lilium asiatic
  unsure (1)..(171): unsure at all n locations
  Clone ID: LIB3229-057-P1-K1-A1
aaaaaacggncgaccacgcctacgccacacattcgggacgcttgtgtttttgacacacgtaccccacgggtacaggcttacatcactcgttttccgtgattcancaacanaagaacagcgtgggctcaccagacacatggaagctttcaattgatactgacaggaggaaag

SEQ ID NO: 3135 - DNA, 263 bp, Lilium asiatic
  Clone ID: LIB3229-057-P1-K1-A10
agaagctgctggcgaaaaatgatgggtgcatcaagcgagctgtattggggctcggcgcagaagataagtatgagtaaggtgtatatatatagttattagtaattataatcgatcctagtatcgtattgtggatatcgtatgtgaggacatgtgtgtgtttgatacttttaaacagtatttggctaccaactgtgttatgcatacctcaagtgagactaagtttatgctatatatggtttttaattatggtggtcttatcatct

SEQ ID NO: 3136 - DNA, 289 bp, Lilium asiatic
  Clone ID: LIB3229-057-P1-K1-A12
gtcgctctgttatcaaatctgtgtggtctccattggtagtctaagaagcgctagtgtgcgagctatttgtgattgcgcctactatatctgaataatgacaatgagtggaactaagagtgcaagataatggagccttactatgtctaggtcttgatgtcaaaaaacacaaaagccaacataaaaacgaacaagaagctgttggttgaattacgagatgggctgaaaatgatcgagcatttcagactcgtgcgtgcaaaatgcaaaaagctgaaatagaagggggcggggg

SEQ ID NO: 3137 - DNA, 276 bp, Lilium asiatic
  unsure (1)..(276): unsure at all n locations
  Clone ID: LIB3229-057-P1-K1-A4
ggggggagcccacgcgtccggccacacggccgtattgacactgaagggactgtttactgccatctccaacnatggggccggggccatatttatctggatcaacatacctgaggacccaactgagccaacggcggcagaagtgttaaaaaaggcagagtctgaagaagactaacatggaagggcgcaagtgagccagggggtgaatagcttctttatgggagtgattgagataagagatataactgaaagagctatgggcattgaggatgaaacaca

SEQ ID NO: 3138 - DNA, 221 bp, Lilium asiatic
  Clone ID: LIB3229-057-P1-K1-A5
gggtggtgttaccattgcccatggcggtgtccttcccaacatcaacccagtcttgctgccgaagaagaccggaaaggagggtacagagcccaagtcaccaaagaaagctgccaagtcccccaagaaggctttatagttgttgatttgattttggtcgcttgtatgtaatcccctagattacacggaacttggaattatgaaatttgtcttcccgtgttctg

SEQ ID NO: 3139 - DNA, 422 bp, Lilium asiatic
  Clone ID: LIB3229-057-P1-K1-A6
gtccccgaaccctaatttcgcgatcgctcttctcaattagggtttccgagaatgggagctgggcgatctttctacggagcggcgggcggcggcgagttgggagctgtcaatgcgcctggctacgttgggatccgatgtcgtggtccgggcctgaggagatctttctctccacatccctcgcgagctatcttgacaagaagctcttggttttattacgagatggccggaaactgttgggcattcttcgctcctttgatcaatttgcaaatgcggttcttgaaggcgcttgtgagcgtgtgattgtgggagaactgtactgtgatataccacttggcctctatgtgatccgtggggagaatgttgtcttaatcggagaactggatttggagagaggggagctacctgaacacatgactcgtgta

SEQ ID NO: 3140 - DNA, 256 bp, Lilium asiatic
  Clone ID: LIB3229-057-P1-K1-A7
cccacgcgtacggggacgcgtgggtgtaggaacacacgtagcccaatgatacgggcttacaacgggcattcggcgtcattattcaatagagttgcagcgagggctcaccagacgtatggatgctctcaagtcattctgacaggtagaaggggctctccttagctacgggagaattctggcccaggaagtttgattaattcttttaagatatattttgcgtgtgtgatttaacagattttgaaatgggacatgtatt

SEQ ID NO: 3141 - DNA, 263 bp, Lilium asiatic
  unsure (1)..(263): unsure at all n locations
  Clone ID: LIB3229-057-P1-K1-A9
agaagctgctggcgaaaaatgatgggatcatcaagcgagctgtattggatgtcatggcagaagagaagcatgagtaaggtgtatatatatagntattagtaattataatccatcctaggatcggattggggatatcggatgggaaggcattgtgggggttggatcctttaaaaaatatttgggttacaaactgggtattgcttccttaaggggagactaagttaatgtaatatatggttttaaataatggtgggctaataatc

SEQ ID NO: 3142 - DNA, 379 bp, Lilium asiatic
  Clone ID: LIB3229-057-P1-K1-B1
cccacttctccgatggcccgcacgaagcagaccgcccgcaagtccaccggcggcggggctgcccggaagcagctcgctaccaaggccgctcgcaagtccgccccggccgtcggcggcttgaagaagccccaccgctaccgcccgggcacggtcgcgctgcgtgagatccggaagtaccagaagaccaccgagctgctcatcaagaagcttcccttccagcgcctcgtgagggagatcgcgcaggacttccagacggatctccggttccagagctcggcggtgtcggcgctgcaagaggcggcggaggcgtacctggttggtttgttcgaggacaccaacctttgtgcaattcatgctaagaggtttacaatcatgccca

SEQ ID NO: 3143 - DNA, 309 bp, Lilium asiatic
  Clone ID: LIB3229-057-P1-K1-B10
aaagactaaaaaggctaacctatcattctgtgatcagtgaacaccagggggggggggggtacttttattgttcagaaaatcaaacacaacaagaccggatgaagcggatgcaacggacaattccaggtgcatccgggggggagcagctaaaccaccaatttcaggtaaagctcacgagcttaatatgaaacttgggccttaacgacaagcaaaacctgacgcctcaaaagcatcagtagcgaggaaacaatcatagaaaactttattcaaaaatatccggggctatcatgagttacacatgataacact

SEQ ID NO: 3144 - DNA, 166 bp, Lilium asiatic
  Clone ID: LIB3229-057-P1-K1-B11
taaggtttgaatgtcatattgttttgtttccgaaactggtatcctatgccgtctgagatttggaaccatctggaagtgttattttgatatttcttttgtctatttggaaatttccgaacaactgagtagtctgttttgaactattcaatttccttatatctgaact

SEQ ID NO: 3145 - DNA, 403 bp, Lilium asiatic
  Clone ID: LIB3229-057-P1-K1-B12
cccacgcgtccggcgaatccgtttggggatgcgaagccccgggaagttgtgttgcaggagcggggtaaggattggcggaagattgatagcaagcttgagcatggccgcgtaaacagacccgagacaaatgaagaaaaacttctcaaagaagagattgataatctcaacaaggcattagtgaaggaaggcgagaaaaatcaaaatgacaattcctctcaagcattggctgacctccgtgagcggataaatcagagagagaatgaactggagaagctaacatgtgagttggatgataaggtccgttttgggcagaagactggtagtgataaccggccagggtcaggttctgcaagcatggagtttgcagacagacctcgatcccgtggtggaatgggtgacgcat

SEQ ID NO: 3146 - DNA, 348 bp, Lilium asiatic
  unsure (1)..(348): unsure at all n locations
  Clone ID: LIB3229-057-P1-K1-B2
aaaaagagggaggcgtcacgccaccgacacccatggcgccgcaccaatttcgttttccgttcagtgaaaactggtgggcaggtccctgttggccgtgtttgccgctacctcangaagggccgctatgctcagcgtgttggctctggtgcccctgtttaccttgcctatgttctggagtatcttgctgctgagctgctggagttggctggaaatgcggcgaaggataacaagaagaacaggatcatacctcggcatattcagctggcggtgaggaatgatgaggagcttggccggctgctgcttgggggcaccattgctcatggtggtgtggtgccaaatattcattct

SEQ ID NO: 3147 - DNA, 411 bp, Lilium asiatic
  Clone ID: LIB3229-057-P1-K1-B3
cagtctcacccaaagcttgaatcatgtttgggcggggtaaaggcgggaaggggcggggcgggggcggcgccaagcgccaccgcaaggtgctgagggacaacatccagggcatcaccaagccggcgatcaggcggctggcacggcgtggcggcgtgaagaggatcagcgggctcatttatgaagagaccagaggagtgctgaagatatttttggagaatgtgatccgtgatgctgtcacctacacagagcacgcacgtcggaagacagtgacggctatggatgttgtgtatgctctcaagcgacagggccggactctgtacgggttcggaggctgatcttcttctctggtatcctagtcttggaggtgctgttattgttagctgggaatgttgttttctgctgtaaagcctt

SEQ ID NO: 3148 - DNA, 291 bp, Lilium asiatic
  Clone ID: LIB3229-057-P1-K1-B4
ggagaggacgcgtccgcagactacccaaagctgaatcatgtttggtttcgaaaaggcgaaaaggggcgcggcgggggcggtgtattgcgttaccgcacggaacttagggacaacatccagggcatcaccaagccggcgatcaggctgctggcacggcgtggcggcgggaatgaggtttatctgactcatttatgaagagaccagaggagtgctgaagatatttgtggagaatgtgatccgtgatgctgtcacctacacagagcacgcacgttggaagacagtgacggttat

SEQ ID NO: 3149 - DNA, 302 bp, Lilium asiatic
  unsure (1)..(302): unsure at all n locations
  Clone ID: LIB3229-057-P1-K1-B7
cccacttatccgatggcccgcacgaagtagaccgtccggaagcccaccgaccggggggggtgcgcagaagctgatgggttcccaagccccacncaagtccgccccggccgtgtgaggtttgaaaaaaccgcaccgataccggccgggcacggttgcgctcattgagatccagaagtgccagaagaccaccgggctgctgatcaagaagcttcccttgcagcgcctcttgagggagatcgcgcaggacttccacacagatctgcggtatgcagatctacgccggtgtcggtgctgaacgaggc

SEQ ID NO: 3150 - DNA, 424 bp, Lilium asiatic
  Clone ID: LIB3229-057-P1-K1-B8
ccacgcgtccggggcaccaaatccgtgtcccgttcagtgaaagctggtgggcaggtccctgttggccgcatcggccgctacctcaggaagggccgctatgctcagcgtgttggctctggtgcccctgtttaccttgcctctgttctggagtatcttgctgctgagctgctggagttggctggaaatgcggcaaaggataacaagaagaacaggatcatacctcggcatattcagctggcggtgaggaatgatgaggagcttggccggctgctgcttggggtcaccattgctcatggcggtgtggtgccaaatattcattctgtgttgctgcccaagaagcaccatgacaagtctaagaagggggacgataagaatactgcttttcacgaattctagtttttctagagtattttagtatgtgtga

SEQ ID NO: 3151 - DNA, 278 bp, Lilium asiatic
  Clone ID: LIB3229-057-P1-K1-B9
aaagaatagaaaggcgaacctatcagacagttatttgtgtccaccagggtggtggtggttacacctaaaatacagaaaattaattcaacaaataccggtttgaaggggttcaacaggcaatttaaaggtccatcgggggggagcagctaaaccaccaatttcaggtaaagcttacgagcttaatatgaaacttggggctaaacgacaagcgaaacctgacgtcttaaaagcattagttgccgttaaacaatcattgaaaactttattctaaaatattc

SEQ ID NO: 3152 - DNA, 463 bp, Lilium asiatic
  Clone ID: LIB3229-057-P1-K1-C1
gtaccggaccgcaggggcggcccaggcgtacgcccacgcgtgcgtaggacttcttccacctatctctacctctctgacaacaacctggccgggccgataccaccttcctttgcttccacatctgtccagggcattgatttctctcgaaaccgtcttactggagacgcctcgcttctgtttggtgccaagaagccactacggaaccttgatttgtcaaggaatttgttcgagttcgacctgactaaggtggtgttttcagagaacctgacgactctagatataaaccacaacaaaatctatggaagtattcccaagcagattacagaactacaggggctgtactacctgaatgttagctacaacaggctctgcggcgagattccgaagctctggctgcatgatcagtcatcttttgtccacaacaagtgcctttgtggacgtccgctggccgcctgcaagggct

SEQ ID NO: 3153 - DNA, 236 bp, Lilium asiatic
  unsure (1)..(236): unsure at all n locations
  Clone ID: LIB3229-057-P1-K1-C12
gctggatacagngctggacaaaggcatttcatatcatggagattcaagcgcacgtgggcgtgcatgcgactttattgttgcaaagacaagaaggtcaaggttatccaaattctgctgctgcttatggtggtggagctagatatgaagctcaagggtcttataatacaactgcttccgggtacagtactgaaccaaggaatgaaacgcccgagtagtccaggtccaaaaactgttcc

SEQ ID NO: 3154 - DNA, 412 bp, Lilium asiatic
  Clone ID: LIB3229-057-P1-K1-C2
aattgatcctgtgagaagaagggtctatgactcaacagatgagtttgatgatgaagtgcggagtgactgtgcaccacacgacttctttaaggtgtttggcccagcatttatgaggaacgggaagtggtctgtagtccagccagttccttccttgggggatgataaaacttcactggaagaggtggacaacttttacgacttttggtatgcatttaagagctggagggagttcccacatgcagatgagttcgagctagagcaatcagagtctcgtgatcataagagatggatggaaaggcagaatgcaaagctgagagaaaaggcaaggaaggaagagtatgcacgcgttcgttcccttattgataatgcttacaagagggacccaagactccttcggagaaaggaacaggag

SEQ ID NO: 3155 - DNA, 326 bp, Lilium asiatic
  unsure (1)..(326): unsure at all n locations
  Clone ID: LIB3229-057-P1-K1-C3
aaaaaaaaggaagacggacgcgtccgaatagaccctcncagaagaagggtcttttactttcaaacgaagcagacaacggggagcgtggaaactgaacatttttcgggtgcaaaaaggtagatggcccaacatttatgaggaacgggaagagggctgtagcccagccagtgccttccttggggaatgataaaacttaactggaagaagtgaacaacttttacgacttccgctatgcatataagagctgttgggagttcccacatccaaaagagttccagctagaacaataatatgcattgttatcataaaagatcgatggaacggca

SEQ ID NO: 3156 - DNA, 407 bp, Lilium asiatic
  unsure (1)..(407): unsure at all n locations
  Clone ID: LIB3229-057-P1-K1-C4
cccacgcgtccgcgccgaggttttgcgccgctctcccccgcctcctccttcgaaggctaggcaaggatggtgagagtcagtgtcttgaacgatgctctcaagagcatgtacaatgctgagaagcggggaaagcgccaggtcatgattaggccttcatcgaaggtcataatcaagttcctcctggttatgcaaaagcatggatacattggggagttcgaatatgtggatgaccacagatctggtaagattgtggtggaacttaatggccgtctgaacaaatgtggggttatcagcccccgctttgatgttggtgtgaaagaaattgagccatggactgcaagattgctcccttcccgtcagtttggttacattgtgctgaccacatctgcngggatcatggaccatga

SEQ ID NO: 3157 - DNA, 368 bp, Lilium asiatic
  unsure (1)..(368): unsure at all n locations
  Clone ID: LIB3229-057-P1-K1-C5
gaaaanaagggggggccgcacgcgtccgcccacgcgtccgcgccgaggttttgcttcgctctcccccgccacaccaacacgcaagggaaaaatgttttgggtttgtgtctttaaccatgctctcaagagcatgtacaatgctgagaagcggggaaagcgccaggtcatgattaggccttcatcgaaggtcataatcaagtgcctcctgggtatgcaaaaacatggatacattggggagttcgaatatgtggatgaccacagatctggtaagattgtggtggaacttaatggccgtctgaacaaatggggggtgatcagccccccgctttaatattggtgtgaacgaaaaatgagccatggactgcaag

SEQ ID NO: 3158 - DNA, 415 bp, Lilium asiatic
  Clone ID: LIB3229-057-P1-K1-C8
tgatggtcgccgactcgcaatttattttcccaccattctgttacccagggggggggagattcttctggttattgggaaatcaaagaaaaatccaagaagtgcgttatgcaagacggcgataatggcttctaccgacgtcttccgcgcatatggtcttgtcttgcttttaacatccgagtacacagctgcttttgatcaattgctactgcagctcctgctcaaagcatctcaagataagaagtttgtgtgtgaagaagctgagagagcgctggattccatggcggtctgcatgtcttcgatccccttgctcgtcaagctccaggcacatgttagtcataccaacatgagggcgagggcaaaatgctgcgggtgccatttcaaaatgttcttcgaagatggatgttgagacaatgaa

SEQ ID NO: 3159 - DNA, 257 bp, Lilium asiatic
  Clone ID: LIB3229-057-P1-K1-D1
caagagggagtgcccggagagctttatttatgcacatgatagtccgtcgctaacccatgactgtgcggagccgcaggagttgaaggtgatcttctgccatgatcagcctgcccgttagggttttagtatggtgttagggtttgtatgagtgtttggtagaggtgttggtgctgattaaggttatgagttctgatggcacatttgaaatgggatgtttggatttggtaaattggaaatgcctctgttgttacttattt

SEQ ID NO: 3160 - DNA, 424 bp, Lilium asiatic
  Clone ID: LIB3229-057-P1-K1-D2
aactccgcagacatcctatgctacaacttgtgggaaagatgaagatggaaccatgggaacaccactagataaatttaatgcactgagctctaatatgaaggagtctctagctcaggagtacctcacttttttgaatgttgcaagcaaagaggagcttctgcagctaaagggcatcggccagaaaagagcagagtacatagtggagctgcgacaggactcgcccaaccctattaaatcactttctgatctcgagaagattggcctatcatctagacaggtgcatgacatgttcagaaggatggctagagggatcttcagctgacacaagttgtcgccgccttatccgatcggcctcatatatcaatttaaagaacaaatcatgatcatggtcgagcattttatgtgatctcgacatttaattatg

SEQ ID NO: 3161 - DNA, 435 bp, Lilium asiatic
  Clone ID: LIB3229-057-P1-K1-D4
acggctggatacagtgctggacaaaggcaggaatatcatggttattcaggtgctgcggctgctacgggatataatgctgggcaaagacaagaaggtcaaggttatccaaattctgctgctgcttatggtggtggagctagatatgaagctcaagggtatcctagtccagctgctcccgggtacagtactgaaccaaggaatgaagcgcagagttatacaggtccacaaactggtcccgggtacaatacccagcctcgatacgaagcccagggctatccgggtgcacagacttcctctctatatagtgatgcttcaaaatatgaaacttggggctatccaggtccacaaaatgctacagggtatccgaacctaaccgggtccatggaaattaagattccaagtagtgcagtggcttctgttcttggggtgaacggg

SEQ ID NO: 3162 - DNA, 101 bp, Lilium asiatic
  unsure (1)..(101): unsure at all n locations
  Clone ID: LIB3229-057-P1-K1-D6
tcgagcggccgcnctagaagatcctaacttacgctctcttttatgcaacaacaaaacaaaactgtagggtcacctatttttatttcactgccccacaataa

SEQ ID NO: 3163 - DNA, 383 bp, Lilium asiatic
  Clone ID: LIB3229-057-P1-K1-D7
acttttgagcaacttcatgtgcaaagtagattgtgtagtgtaccattgctcgacgaaaaattgaaaagaattcccttcttataaaaagtataaatcttctgtcttgtcttggatcttggacattggaaagaatacattcaatagtgaaagttgccttaccgatcataatgggtagatttggtagtggcttcaacactcggcaacatctatatgtattgatgggataagtctaaaatctattgtcttgtgactcctcaaattgtggacttcaagtcttctctctatgaaaatcgacttattataagaacggaactttgtggaatttgatgcttgttcatcaagtatactatgaccgatgtttggtagtgacggtatctttggaa

SEQ ID NO: 3164 - DNA, 93 bp, Lilium asiatic
  Clone ID: LIB3229-057-P1-K1-D9
atagatcaccagcggccgctttagaggtgccaagcaaacatacccggggaggccgcgaaatatctagtgtatcgggtcaccaaaaagcaataa

SEQ ID NO: 3165 - DNA, 419 bp, Lilium asiatic
  Clone ID: LIB3229-057-P1-K1-E1
atcccctctccgtctgagattccccggttgagtgagatggggctcactttcaccgggctggtcagccggttgttcgcgaagaaggagatgcagattctgatggtcggtctcgatgcggctggtaagacgacgatcctgtataagctgaagctgggcgagatcgtcaccacgatccctaccatcggattcaatgtggagactgtcgagtacaagaacattagctttactgtttgggatgttgggggtcaggataagatcagacctctgtggaggcactacttccagaacacacagggactgatattcgtcgttgatagcaatgacagagatcgtgtggtagaggcaagagatgagcttcacaggatgctaaatgaggatgaactgcgggatgctgcgttacttgtgtttgcaaacaaaca

SEQ ID NO: 3166 - DNA, 428 bp, Lilium asiatic
  Clone ID: LIB3229-057-P1-K1-E11
gataaacttgcatcacgtttcgaagctcacgcttccgatgtgaacacagggactgttgctgatgaaagtggcaacctcatatattcaggcagtgatgattacctctgtaaggtctgggacaggcgctgctttaacagtaatggacaaccagcaggaactttgaccggacatttagaaggtatcacatttattgatagccgtggagatggccgttatttcatttcaaatggtaaagatcagactaccaaactttgggacattcgcaaaatatcttctgatgttaacagttccagaccaagaattcctgaatgggattacagatgggaagaatacccacaccaggctaggcatgtaaaacatccatgcgaccaatctgtagcaacgtacagcggacattcttgtttgcgtaccctaatacgctgctattt

SEQ ID NO: 3167 - DNA, 424 bp, Lilium asiatic
  Clone ID: LIB3229-057-P1-K1-E12
cccacacgttcgcccacgcgttcgtttcacatggaccgaagaagaagggtggtgtgattagtgttttatggaggggattcaagcaactcgatcaagattggtgaagctcctggttttgcccccagagatggtgaaattttactggtttattccagaaagatggtgattcttctctggtctctgttgtcccatgaaaagaaggcagcatattgtgatgtgcaactgacgccagatgtaaatatttatagctctcttcttcagaggtcgtggttgctgagctataagttttggtagttattgtttctttggatctaggcaaattgccttgcaacaaatttattacattttttgtaccatgaattattttcgctgcagttgaacttgttcaactgctttttagtttagtttcttgatgcccgtacta

SEQ ID NO: 3168 - DNA, 435 bp, Lilium asiatic
  Clone ID: LIB3229-057-P1-K1-E2
ccagaatttcatatattataaaagagatacaaaattgtgaaaatataaaaatactgattgtgttataatttttatgccattggagaaaatttgaccacagactgcaagcccatgggagaataactgattaagaaagataaattgtcggctgaagaggagttgagagtaattcaagcacataaaaatattggatcacagtgatataaaactaaatgacaaatgtttccttatagccgaaagataatgaaaaatacaacactcccttgtaatattacattagaaattgtacaattactaatagtggagatgactggatttgcaagactaattaagatgtaaacggtatagttgatatgcccttcttccaatacgatgaacaggctttctacatttgtgcagcccatgattaattcaaataatttgacatttgagaaa

SEQ ID NO: 3169 - DNA, 145 bp, Lilium asiatic
  Clone ID: LIB3229-057-P1-K1-E3
aaacaacaaaccacaaaactgcaagcccatgggctgaatcacacgataaacaaagacaaactggtcggctgatgaggaatttctcagtaacccaagcacataaaaatatataagcacagtactataaaacacaacaacaaacgca

SEQ ID NO: 3170 - DNA, 439 bp, Lilium asiatic
  unsure (1)..(439): unsure at all n locations
  Clone ID: LIB3229-057-P1-K1-E4
accgctcaatctccttctcagctcaagcagcattaatgntcggagccgtggcaagggccgggaaggggcgttggcaagggtggagcgaagcgtcaccgcaaggtcctccgcgacaacatccagggcatcaccaagcctgccatccgccgcctcgcccgccgcggcggcgtcaagcgcatcagcggcctcatctatgaggagactcgtggggtgcttaagatcttcttggagaacgtcatccgtgatgccgtcacctacaccgagcacgcccgccggaagacggtcaccgccatggacgtcgtctacgccctaaagcgccagggccgcaccctctacggcttcggaggctgatcgatctatctagggtttggttttgctgcaatgtttggatgtggattggatctncggttatctntttatattttggtttggtggatgt

SEQ ID NO: 3171 - DNA, 367 bp, Lilium asiatic
  Clone ID: LIB3229-057-P1-K1-E5
gctcatctacttaaaatttaaacaacttttttttttaaccaaaacaagaaaaggggggggggggacaagggtggtgtttatgcgtcaccaaaaggacctccgcgacaacatccagggcatcaccaagcctgccatccgccgcctcgcccgccgaggcggcttcaagcgcatcagcggcctcatatatgaggagactcgtggggtgcttaagatcttcttggagaacgtcatacgtgatgccggcacctacaccgagcacgcccgccggaagacggtcaccaacatggacgtcgtctacaccctaaaacaccagggccgtaccctctactgattctgaggctgatccatctatctagggtttggtttt

SEQ ID NO: 3172 - DNA, 188 bp, Lilium asiatic
  Clone ID: LIB3229-057-P1-K1-E6
ctagtggtctttggttactgttaagaggcttttctttctggtagacttttgtttgcatgaccaatgttgtgtttcatggtgctttgtgggcaactagttcatcctctggacaagtttgtgggcaactagttcatcctctggacaagttttggcgtagttgaatgggttttatctgaatggaatttatc

SEQ ID NO: 3173 - DNA, 113 bp, Lilium asiatic
  Clone ID: LIB3229-057-P1-K1-E8
gggggacccacgcgaacggaacaagatccccagcacactctcttttttacgcaaacccaacaacgggggcgtgcgaaaacttatgttttttggcctctcaccaaccaacaaaa

SEQ ID NO: 3174 - DNA, 430 bp, Lilium asiatic
  Clone ID: LIB3229-057-P1-K1-F1
gctttatggaatattctagagtatctcccatggtttatttgagttttctagagtgctctggggagggatattctagggatcttctagaatgttgtaaataacatatgtgaataatgtaaagagtagaaataggtagagggatctagagatttcctaaccactaggatgtggacaagtggcacaatcctaatgggtctttggaagactctagaacccatttgagttgtataaaaggggaggagctcctttgctccaaaccatccaaggaattatcaaaggaatacaagcaagtttcctattctctagagtgctctcctctctcttatctcccttccccacacttagagtgagtgtgagtgtttggctggctaggcatcgcggagggtgttctagcgccgcacgggctctgcgcgtaagtagaagagttggt

SEQ ID NO: 3175 - DNA, 333 bp, Lilium asiatic
  Clone ID: LIB3229-057-P1-K1-F11
gcaaccctctcagcagatgccactctatggccagccgcctcattactgagttgaatggaagtgctagaggattttgggaagattgaagatctgaaagtgccagaggatgctatttgggccaagtagaatgaaagttttgcataatatatgctgcatgtgtccctaatttatattggcattcagatttggtgggcttggtactgtatcagattttccttcttgactgcttttatgtggcgaagtgtaatcaccaactttgtgaatggggagctttgagctgatttcttggttttcttttggtttgatagggaaatataaattgaacgttgattt

SEQ ID NO: 3176 - DNA, 425 bp, Lilium asiatic
  Clone ID: LIB3229-057-P1-K1-F12
cctacactttcgcctccgctttccaatccggccgccaggcatttactaaagttgtgcgtagctgggcttgaaagaaatttatgacaggatgtgttatcctttttccaattgcgatcaccttctatatcacctggtggtttattcattttgtggatgggttcttttctccaatctatgcccaacttggaatcaacatatttggacttggtttcgtgacttccatatcattcatatttttggttggagttttcatgtcctcatggttgggggcatccgtccttggtcttggtgagtggtttatcaagcggatgccttttgttcgccatatttacaatgcgtccaagcagatcagttctgctatatcacctgatcagaatacacaagccttcaaagaagtggctattataaggcatccccgcattggt

SEQ ID NO: 3177 - DNA, 371 bp, Lilium asiatic
  Clone ID: LIB3229-057-P1-K1-F3
agctattgcggagctggatacacttggtgaggaatcttacaaggacagcactctgattatgcagctcctccgtgacaacctcaccctgtggacctcagacatgcaggatgatgttgacgagatcaaggaagcacccaaacgagacgatgagtagtagcaacttcaaacaagtccagcattctgtttatggaattctagtagatagctgaatgatgcctgttatcttatattttatgggatttttaggtgttttatttctcgttagtttgtagcccgtctcttgtgtttcgacttggatggtccctatcattttatcctctaaatcagtggctttcgtgcaaaaaaaaaaatataaaaaatttctatatttt

SEQ ID NO: 3178 - DNA, 463 bp, Lilium asiatic
  unsure (1)..(463): unsure at all n locations
  Clone ID: LIB3229-057-P1-K1-F4
ccgtccggttttgagaccacacatttccggaccgcctctatctgctgatccgatgagactgtacttactcccgatgctcgcgacgaccgagtgcctggcgcttcaaaacactctagacgaggttcactcnttccggcaaaactcttcatcgtccgcgagatgagaattaccaaggantgatgntgaaggtttatgcccggcagtgtcatttgccacggtggaggggttactctaatgtnttctcgttggtattgagaccgtctcttcagactcttgcagtgaggtttcctggcaaggctgctggagtgaatattggtggacaagttccaccgtcggaacctgcaccttcgtctgaggctacaaaggtggtggccgaagaagatgatgatgatttggatctctttggtgatgagactgangaggagaagaaggcaactgatgagagggaggctgctgtcaaagc

SEQ ID NO: 3179 - DNA, 126 bp, Lilium asiatic
  Clone ID: LIB3229-057-P1-K1-F5
caaaaaacgggggggcccacgcgtccgcccacgcgtccgatcgcgagcgggcgctctagatgatccaagcttacatacccggcgtgggacaacatttttcgtgtatagcgccacctaaattcaatt

SEQ ID NO: 3180 - DNA, 419 bp, Lilium asiatic
  unsure (1)..(419): unsure at all n locations
  Clone ID: LIB3229-057-P1-K1-F7
gaatcccaccactgggtgccagaagaagctcgagatcgatgatgactcggagctgggggctttttatgacatgcgtatctcccangaagtcaatggtgatgctctaggagaggagttcaagggatatgttttcaaaatcatgggaggatgtgacaagcaaggcttcccaatgaagcagggtgttcttactcctggccgtgtgagacttctgctacacagaggaactccttgtttccgtggatttggtaggcgcaatggagagcgcangaggaaatctgttcgtgggtgcattgtcagtcctgacctgtcagtcatcaacttggtcattgtcaagaaaggtgataatgatcttcctggtcttactgatgttgagaagcccagaatgaggggaccgaagagggcttccaaaatccggaagc

SEQ ID NO: 3181 - DNA, 357 bp, Lilium asiatic
  unsure (1)..(357): unsure at all n locations
  Clone ID: LIB3229-057-P1-K1-F8
gatgctggaagtttctgcaatggtggttactggtgctattaccattatgggaggggtgacagattctggcgtccgaagatcttanggcgcatggatgaaccatgctgcttcaaattatccgggggctatatcatttctaataatggatttccttctattctctggagttgcagttttaactgtcgtgcatgcatcacagatctcacgaaacataacaacaaatgaaatggctaatgcgatgcggtatacctatctcaaagggtctggtggacgcttcagaaatgcgtatgatcatggtgtgcagaagaattgatcaaactttttgttgaatgggtataatgaaaatgtggtgtgccc

SEQ ID NO: 3182 - DNA, 364 bp, Lilium asiatic
  unsure (1)..(364): unsure at all n locations
  Clone ID: LIB3229-057-P1-K1-F9
gtgacattcagttcatcttgatcctagccttgctgcttgggctggggtgctgcggggacttgcagaccaagtgctcgccggagctgacaaagctgatggcctgcctgaactacgccaccgcccaggccgatgccccgaccagtgagtgctgcacttcggtggctggcataagggggagtgaccccgaatgcctatgctacatcatccagcaagccagcaagggaggggctactacgaagagcctcggcctacagatatcccgcctncttcagcttccggaagcatgtaaagctgacttatggccagggtaacgactggcctaagcttttaagcttggcggggagctcttcaaaacaatgccatc

SEQ ID NO: 3183 - DNA, 378 bp, Lilium asiatic
  unsure (1)..(378): unsure at all n locations
  Clone ID: LIB3229-057-P1-K1-G1
gcgaccgacgcgtccgggaaangctaatattttatggtaagtttttggttgacgggaggacactagctgcgtacgtgtgtacaatttgaatttctcggccaccnaanactacgaatgcggagaggtatgcagatctttgtgaagaccctgactggcaagaccataacccttgatgttgagagctcctacaccataggcaatgtgaaggccaagatccaagatagggagggtattaccccggaccagcaaaggctcatctatggtggcaagcagcttgaaaaccgcaggatctttgctgactacaacattcaaaaggagtccacccttcattttggcctcaggctcaagggagggatgcatatttttggtaaaaccctt

SEQ ID NO: 3184 - DNA, 200 bp, Lilium asiatic
  Clone ID: LIB3229-057-P1-K1-G10
aaaaaaaaaaaaacggggcgacccacacgtccgacaaaaaattaaaaaaaaattttataattgtaaaaaaacaaaaaaccaaccgaactggggaaaccaaaaattcttccgcccacaaacaacaaaaaaacaactccttaccccaacccaaacccacaccactctcccccgtttgacaacctactcacatctaaaaccct

SEQ ID NO: 3185 - DNA, 414 bp, Lilium asiatic
  Clone ID: LIB3229-057-P1-K1-G11
cccacgcgtccgcccacgcgttcgttgtaaacatagtactaactagagtgaggggggctatgattcctgaccaactccacataagcgtatgagtgacagtcatatgtatcatattgctaaccttaaacaagactatgtttcctataatgaggggtactatgattcctcaccaactccacataagcgtatgagtgacagtcatatgtatcatattgctaaccttaaacaagactatactaggatacatataatgcacaataatgataagcactcactcatatgatttaaagatttttagtccaagaattgaaccataggagatggtacatagcctagatatgtactttcagtcgatcaccctcaggtgtaccaaatataatatcatgtttggaccctctactaagtggacatctt

SEQ ID NO: 3186 - DNA, 413 bp, Lilium asiatic
  Clone ID: LIB3229-057-P1-K1-G2
ggaacttcagtgatactggttgctttgggtttggaatccaggagcatattgatcggggggtgtaagtacgatccctccactggtatttatggaatggatttctatgttgttttggagcgtcctggatatcgtgttgggcgccgtcgtagatgcaagtcccgtgttggtattcagcacagggttaccaaagatgatgccatgaagtggttccaggtcaaatatgagggagtgattctcaacaagtcccagaacatcacttcttagacccgttattactctcttgcagtcttttcttgtcattgtggtagattagtgtaaactttgcagtattgcaaacttaattttgctttttaagttttgacttgcaataatctggtatttttatggtaattgaatttctcaaaattattgcc

SEQ ID NO: 3187 - DNA, 420 bp, Lilium asiatic
  Clone ID: LIB3229-057-P1-K1-G3
gcagctactccatccattttgcccccgttattttggtcccgatgatctggcttgtctggggttatcagtcccttctatcatcacacagggtgaaggggcagatgctatcgctaaaccgagctcgaatagccactcagatgttgatacagaagtaacagggagtgtagatgatagtattgaagaagtgatcaatatgcgtatagaagtggaaggcaagaaggagccttccttgaggagatacgaactattggtggagagtcagcttgcagaggatctcgttggaacttcaattgaacatgttggtgagctccttcgatcaaattttggcagagaagtaatatacgaggtagctgtaggtggaactgatggtgttctacagtccttagacgatcgagtagctgccctgcataatgctatagc

SEQ ID NO: 3188 - DNA, 378 bp, Lilium asiatic
  Clone ID: LIB3229-057-P1-K1-G7
cccacgcgtccgcggacgcgtgggattaccttcaatgatgtacatttgggcagggagcagtgttgctattgttggaaccacaggcaatggcaagtcaaccatacttagattgctctacaaattttttgacactgattctggatctatccaaatagatggtgaagacatacgagatgtcaccattgaaagtcttcgcaagtgtattggtgttgggcctcaagatactgtactctttaatgacacaatattccacaacatacattatggtcgattatcaacaacagaagaggaggtgtttgatgcttctcgaactgcagccattcacgatacaatattgaactttccggaaaagtattcaactattggtggagaacgggg

SEQ ID NO: 3189 - DNA, 337 bp, Lilium asiatic
  Clone ID: LIB3229-057-P1-K1-G9
gctagtggttgctgagatcttctaatgttacacaaactggatgctaacgggacggggcaaccttactttggtccgcggccaaacaacaaaatagactctactatcaagccacctaaatataatttcactggaccagccgatttacacccaactgacctgggaaaaacccggggcgccccccaaaagaatccacttttccccacccccgcctttccaccaaattaggctttttttttgttgaccccaaaaccaattccctcgcccaacaaaacaacaaactgactggaaaaacccccgcgccccccaattttattctctttccgaaaattgccctttt

SEQ ID NO: 3190 - DNA, 193 bp, Lilium asiatic
  Clone ID: LIB3229-057-P1-K1-H1
attctgctttctttgttcttgttaatattcgaatgtcatatgcgagggtgtgaagtgtacatgcttaattcggctgacatttcttgaatgcagcattgttgtgattctcaagcctctgtgtatatgttggttgtgaagtgtacacgcttaatatggcggacattgttcgaaggtagtattgtagtggttcaaa

SEQ ID NO: 3191 - DNA, 266 bp, Lilium asiatic
  Clone ID: LIB3229-057-P1-K1-H12
caggattgaggcagcaggtggttttctttctcaacaacttctcactaatgaagtgagccaggcaagtgccttttcacctcctccttcagatgttgacaacaaagttactataatacctcggatatatgaggttgtcggtcggttggaccgcatcatcgctggtgtgagtagactcctcggaggaggaccttcatgtgtcccccaatagcaagttatcatgtcacgacctcttttttatcttcaaaacaaaccatctttggcagtgg

SEQ ID NO: 3192 - DNA, 432 bp, Lilium asiatic
  Clone ID: LIB3229-057-P1-K1-H2
cccatggctgccatcactgcagcaccgtcctccaccttcgcccgcgccgtcttggcgaaggggcagtcggtcatcacctccgcatctccaattctcgggttgccgcagttgggagtgaggggtggaagagttcggtgctcggcagtaccggagaaggcggctggacatggcaaggcagctggggcagcaattctggcagcggcgacaagcgtgatgtcaagccccgcactggcactggtggacgagaggttgtccggcgaggggacagggctgccctttggtctgagcaacaacctcctcggatggatactgttgggagtgtttgggatcatctggtccttctactttgtgtacaccaactcccttgaggaggatgaggagtctggtctttccctctaagtatgcagagatgtgtatattcatcatttgtgt

SEQ ID NO: 3193 - DNA, 222 bp, Lilium asiatic
  Clone ID: LIB3229-057-P1-K1-H3
gtatagctgcttagatggtacatgtggtgcatgtgtatggtagattcaagggatctatcagcgagcattgtgtaccttcttttctcgaggatcagaaaacagaccgtccttggtttgctggagcgtcgactatggttctttgtggcattgcaaaacttttcgactgtttgtaacatgtaaggttagagaatttactgttttaacatattttacttgagttta

SEQ ID NO: 3194 - DNA, 468 bp, Lilium asiatic
  unsure (1)..(468): unsure at all n locations
  Clone ID: LIB3229-057-P1-K1-H4
cgtncacgccgcgaccggacggatggtattgaccgatctgtatttacctggtctcatactttactccagaaatgcggccatcatgccccaccgtattccatgagtgaggctgcaacatgcaggaccggggaatacatggtggcnccaggtgtgcacntnntagggcttcntacctcagaagctnngcgatcccttaccagcccttctttgatcttccagaatcggcagcttccacctcagcttcgtcgtcgccgtccccgaatttggagtgggctttgatagagcattggaccaggccattatttgccggaatttttcaaccagagcttttgatgttaaatccagatattctgttcatggcagacacatgcaagatcaattaggaagcaaagtcagatcaaaagcagtgataccttctaaggtacagaaagatgatcaagaaattgatcagaataagagtgatatagt

SEQ ID NO: 3195 - DNA, 421 bp, Lilium asiatic
  unsure (1)..(421): unsure at all n locations
  Clone ID: LIB3229-057-P1-K1-H6
cccacgcgtacgctgatcactgccgcttctggtggcgttggacactacacantcgagcttgcaaagcttgggaaccttcatgtgacggccacatgcggagcacgaaacatcaactttgtgaaggatctgggtgctgataaggtgcttgactacaagactcctgaaggggccagcttgaagagcccttctggcaggacctatgattcagttatacactgtacgaccggtattagttggtcgacatttgagccaaatctgagtcctaatgggaaggtgattgatattactcccagtccgtctactatattcagctatgttgtgaagaagctgacatgttcgaagaagcaaccggttccgctgctactgatacccaaagaggaggaattggggtttctggttgaactggtgaaggaggggaagc

SEQ ID NO: 3196 - DNA, 252 bp, Lilium asiatic
  Clone ID: LIB3229-057-P1-K1-H7
cagaagctcactagtgtgcataggaaatacaacacactcaaatctgggtacactgggagaactgaaccggccatattcttgctggattaaggactgcttataaattagtgatttatcaataaaggttgatagcttgcgaatgatgatttaattataattgaattttgtgaagtttgagtatgtaggatttgtgatgtgctgctatatgcaacagaagttgcaaaaactgagggaatgaggtatttactttta

SEQ ID NO: 3197 - DNA, 403 bp, Lilium asiatic
  Clone ID: LIB3229-057-P1-K1-H8
gcatttcgttggttgtgtgctggtgctactggaagaatgcatacacgggcgcgtgtggatggccacagctgtggacgcttcaaactcgaccaggtaaagacgacagaacacgcattacaagaccattaccgctacatgcactatcacaaccgttacaaggctcatactgaatctatggaaaaggaaaacaaactcaagaaaagcatccaacataagatagccatctcaaagatgaagttcaacagaatgaaggatttcacgtgggtaacgaatgggctgagtaggctattcagatcaaggcgcgtactttcatactcctatccttttgcatactacatgtttggcgacgacctgttcaaggacgagatgacacacgaagagagggaaataaagcagaatttat

SEQ ID NO: 3198 - DNA, 339 bp, Lilium asiatic
  Clone ID: LIB3229-057-P1-K1-H9
cagccggaaaccttggtctaagtttattaatgcggataaccagcatctagtttctgcagaggcaatagattttcttgacaagcttcttcgatatgatcatcaggatcgacttaccgcacgagaagcaatgacacatccatatttccttcaggtgagagcagcagagaacagcaggactcgtccccagtaaggttggtgttgctgagtcggctattcttaactatggtggcggtgttacaaatttgacatgagttggctattcatagctatgtggacggtggacggtgttacaaatgtgactttcatgttcttactgtctgttgacattttcctgcattt

SEQ ID NO: 3199 - DNA, 438 bp, Lilium asiatic
  Clone ID: LIB3230-001-P1-K1-A12
acagctcttgttgctggcacggaggatgggataaaggagccacaggcaaccttctcagcgtgttttggagcggcattcataatgcttcacccaactaagtatgcagcaatgttggcggagaaaatgcagaagtatggggctacaggttggctcgtcaacaccggttggtctggtggaaggtacggtgttggcagccgcatcaaactaccttacactcgtaaaatcatcgatgctatacactctggcagccttctgactgccaactgcatcaagaccgaggtgtttggtctggagatccctacagagatcaaaggtgtgccatcggagatcctcaacccagtgaatgcttgggaagacaaaatggcctacaaggagactctgatgatgcttgctggcctggttaagaagaatttcgaggtatttggcagatacaaaaat

SEQ ID NO: 3200 - DNA, 84 bp, Lilium asiatic
  Clone ID: LIB3230-001-P1-K1-A3
cggacgcgtgggtgctcttactagatttgagctcttaagttcgagagcttcatatttgggccggggctgaccagagacatgtga

SEQ ID NO: 3201 - DNA, 456 bp, Lilium asiatic
  Clone ID: LIB3230-001-P1-K1-A4
gtgattattaccgctatctggctgagtttttgattgaacatgaaaggaaagaagctgctgatcagtcgatgaaagcttatcaggctgcttccaacacagccaacactgatcttccctcgactcatcccattcgactcgggcttgctctcaatttctcagtcttctattatgaaatcatgaattctcctgaaagggcgtgccatttagcaaagcaggcctttgatgaggcaattgcagaactggacaccttgagtgaggagtcgtacaaggacagcactttgattatgcagttactgagggacaatctcactctttggacttctgacttccagaggatggaggcgatgatggtttcagggcgaggaggcccaagctgctggtgatgatgagcactagtaatgactgcttttaacttcccgcttggagatttctagtagtggcggatattggctgagc

SEQ ID NO: 3202 - DNA, 110 bp, Lilium asiatic
  Clone ID: LIB3230-001-P1-K1-A5
gctgagcctggctcagaccatgtatcatttcatcagcggctacacagctcttgttgctggcacggatgatgggataaaggggccacaggcaaccttttaagcgggtttgg

SEQ ID NO: 3203 - DNA, 481 bp, Lilium asiatic
  Clone ID: LIB3230-001-P1-K1-A6
gctgagcctggctcagaccatgtatcattttatttgcggctacacagctcttgttgctggcgacggaggatgggataaaggagccacaggcaaccttctcagcgtgttttggagcggcattcataatgcttcacccaactaagtatgcagcaatgttggcggagaaaatgcagaagtatggggctacaggttggctcgtcaacaccggttggtctggtggaaggtacggtgttggcagccgcatcaaactaccttacactcgtaaaatcatcgatgctatacactctggcagcctcctgactgccaactgcatcaagaccgaggtgtttggtctggagatccctacagagatcaaaggtgtgccatcggagatccttaacccaatgaatgcttgggaagacaaaatggcctacaaggagactctgatgatgcttgctggccctgttaagaagaatttcgaggtatttgcagatacaaaatt

SEQ ID NO: 3204 - DNA, 345 bp, Lilium asiatic
  Clone ID: LIB3230-001-P1-K1-B11
gacgactttgcattcagaacctcattgcaaggagtactatttttccagactaaaggtagctggggtcttcctggacctgaaggaatgttctctctgcgcctctggtattcattatttttgtaaccagatgctttgagctgtgccgaagcttttccaagtcccactgcctggaatgggctcagctcagcaaacaaatctcgagattcgtcagtggagcttccatttctcacgttatcactttccacagggatcttaaggacccctttttgttttgcagaagtggcacttgtagaaaatgatgactggttttcttgattaaagagaaagcatactttataatttcat

SEQ ID NO: 3205 - DNA, 160 bp, Lilium asiatic
  Clone ID: LIB3230-001-P1-K1-B12
caccactacagcaatcgagcaatgtcaggacgatggtattggtgggaaggggctgggcaagggcggtgcgtaagcgccaccgcaaggtgctccgtgacaacattcagggcatcaccaagccggcgatccgtcgtctcgctcggcgcggtggcttgaagag

SEQ ID NO: 3206 - DNA, 186 bp, Lilium asiatic
  Clone ID: LIB3230-001-P1-K1-B3
agctgctagcacctcggtggagattcccgttctgtgcaaactgacccttgtcattgatgactcagaagatgacctcagataatcgggaagctttatttcatgtacgaatacaggtgaaacaagaattgatcgagggtattgttgatttcggttgactgataattttaatattattatgcgtattat

SEQ ID NO: 3207 - DNA, 297 bp, Lilium asiatic
  Clone ID: LIB3230-001-P1-K1-B4
gtggagggagaaaatgaggcgaagccttggatttggtagatggatgttgtgagaagtggataacagagaactctataaaggatgtctgttccggaagtagtttgtgacactttcccacatgtcccaacccagagaggacaatatgcggctaggcttgaatggacttggttttggttagaatgctggatacaacagaagacaaatggcataccgttaaaaatgccttgtggttcctgctttactgaatagattcctgagcttcaagttttagatttcaacctgcccttgagattttta

SEQ ID NO: 3208 - DNA, 465 bp, Lilium asiatic
  Clone ID: LIB3230-001-P1-K1-B7
caaagcttcatctccaccgattccccatcgatccatggctttctgggggatcgaaatcaagccgtcaaagccgtacactcacaagcatgatagcacccgcggccggctccgcatctctcaggtaacactcgggaatgggaagtcagtggagaaggtcacattgcagtgcaatgtgggcaacaagagccccatcttgctctgtagactgacccctgatgtatctgagacctgccatctggagctagagtttgaagaggatgatgatgttgtattctcagttcttggacagaggagtgtccacctctcaggatacttcgttggtttgggtcgcgatactggtggcaatgagactgattcatatggtgaagatattgctcattcggatagtgatgattcaaacttctacgccagcattagggaagatgagtacgagtctgacttcatagatgatgatgatgatataga

SEQ ID NO: 3209 - DNA, 329 bp, Lilium asiatic
  Clone ID: LIB3230-001-P1-K1-B9
cggacgcgtgggtctgaggcttgatttgaatgatgttccgttcaaggagtggattgcgaggacggtggaggcggccggggtgacggagattggttccggggaggagacggtcgggggagatgatgatgagccccaggagattcagattgaatgagagtgatttcacttatatgtgtaagatttcctaaattgttggttatgttagttgtttagtgttgttacaagtaaattatgaagttgggttttcggtctgatatagaaggttaatagttgatttggcttaccttttatggatgcccatattaatagttgattgtgtcttacctttt

SEQ ID NO: 3210 - DNA, 497 bp, Lilium asiatic
  Clone ID: LIB3230-001-P1-K1-C1
caaatagtgagaaggaagcttggaggttgtttttttgtgacatgccagttacttggcgtggttctggaagagaaggcaccagaagaacttcagaaacaagctaccgtgaggctctctgttgtggacatacttctggaaattacgaagttttgtgatctttatttaatggaaacagttcttgatgatgaaagtgaggaaagagttctctcagctctacagagtgctggacttttcaagactgggggcttaattaaggaaaaggttctcttttgtagcaccgaaatcggtcgaacctcttttgttcgacaattggaggcagactggcatattgacacaaacttcgaaatcgtctcccaactctctcggtttatcagacaccaactgcacatcacaccggcaatttcgggacctatagcaccgagcgtctttaccttaaccagtctggtgcagtacttttcgcgcctttgatataaggaaatgtttatacatgatgtctg

SEQ ID NO: 3211 - DNA, 198 bp, Lilium asiatic
  Clone ID: LIB3230-001-P1-K1-C11
ggccgatatgctcagcgtgtcggctctggagcttctgtctaccttgctgccgtccttgagtaccttgctgctgaggttcttgaattggctggtaatgcagctcgggacaacaagaagaaccggattgtacctcggcatgtgtgcctggcggtgagaaatgatgaggagcttggaagactgttgggtggtgttactatt

SEQ ID NO: 3212 - DNA, 82 bp, Lilium asiatic
  unsure (1)..(82): unsure at all n locations
  Clone ID: LIB3230-001-P1-K1-C2
ggaaggcccggggtcatagagaaccacaacancattacccaaaacagagcgagcaatgttcttattataccccaaaccaaga

SEQ ID NO: 3213 - DNA, 107 bp, Lilium asiatic
  Clone ID: LIB3230-001-P1-K1-C3
gatttgcagcccatggctccaattgatggtgtatttcaagtgcagggagatatcactaatgctcgaactgctgaagggtataacattcgaggatgtagctgctggtg

SEQ ID NO: 3214 - DNA, 411 bp, Lilium asiatic
  Clone ID: LIB3230-001-P1-K1-C4
ggattctgcggaatgcgtttgatgatgaccagatgccttacctgccaaagcacatcctatacaggcagaaagaacagttcagtgatggagtgggatatagctggattgatggcttgaaggaccatgcaaatgcaaatgtttcagatgccatgttgatgaacgctggctttgtttatccggaaaatactccgttgaccaaggaggcatattactaccgttcaatatttgagaagtgctttccaaagaatgctgcaaggttgacggttccaggtggcccgagtgtggcatgcagtagcgccaaagcagtagagtgggacgaggcctggtctaaaaatctcgacccctctggtcgtgccgtcggggttcattctgcagcttacgaagaggccccaaaagcagccttgggcgccc

SEQ ID NO: 3215 - DNA, 378 bp, Lilium asiatic
  Clone ID: LIB3230-001-P1-K1-C6
aaggtcctcaagaccactgtgcctgctctgtttgttctcaacatgatcaagaatctcgctggctcagctgtcgctggtgccttggggggattcaacgctcatgccagcaacatcgtgtctgccgtcttcattgccactggccaagatcccgcccagaacgtcgagagctctcactgcattaccatgatggaagctgtgaatgacgggaaagatcttcatgtctctgtgaccatgccatctattgaggttggtacagttgggggtgggacccaactggcatctcagtctgcttgcttggacctcctcggtgtgaagggtgcaagcatggagtcgcctggagccaatgcaaggctcctggccactatcatagctggtgct

SEQ ID NO: 3216 - DNA, 198 bp, Lilium asiatic
  Clone ID: LIB3230-001-P1-K1-C7
accaacgaaacacgacctttttatacaaaatcacaacaacacaccatgggacggccccaaaaaaagaaagggcagcctaaaaacaaaatacccacccaaaccaaacagacaaatcctccacaaagcaaacgtaggtctcctaaagggccgattcggcagaccagcaaacacaagggaaaccaaggaaagaaaccccca

SEQ ID NO: 3217 - DNA, 455 bp, Lilium asiatic
  unsure (1)..(455): unsure at all n locations
  Clone ID: LIB3230-001-P1-K1-C8
cttaaactgattgtcatggattgggtaaagaaggtggcgtggcagtattctttgcctaaggatttggtttctatcactagcgctgccattatgccatatggttcttatggattaggagttcatggtacggattcagacattgatgctttgtgtgttggcccttttttcgcaacaatggaaacggatttctttggtgttctgcgcgacatgcttcagaaaatgtctgaagtatcagacattcactgtgtcaaaaatgccaaagtacccttgatgcgcttcaagttcaatggtgtcttggttgatttaccatatgctcagctacaagttgtctctgtgccagagatggttgatttggtcgatccttcctcaatcatcgctgatcacactagttggaaatgcttatctggggtacgtgttaattctatgatcctncgnctagtgccaaatttggagaa

SEQ ID NO: 3218 - DNA, 386 bp, Lilium asiatic
  unsure (1)..(386): unsure at all n locations
  Clone ID: LIB3230-001-P1-K1-D12
cggacgcgtgggcgggcttgtaaccttgcaaagcaggcttttgatgaagctattgcggagctggatacacttggagaggaatcttacaaggacagcactctcattatgcagctcctccgtgacaacctcaccctgtggacctcagacatgcaggatgatgttgacgagatcaaggaagcacccaaacgagacgatgagtagtagcaacttcaaacaagtccagcattctgtttatggaattctagtagatagctgaatgatgcctgttatcttatattttatgggatntttaggtgttttatttctcgttagtttgtagcccgtctcttgtgattcgacttggatggtccctatcattctatactctaaatcagtggctttcgtgc

SEQ ID NO: 3219 - DNA, 360 bp, Lilium asiatic
  Clone ID: LIB3230-001-P1-K1-D7
ctcattgtcacctgcgctgagataaccattgtgctctgctacttccagttgtgcagtgaggattactcgtggtggtggaggtcctatttgacttccggctcatcagcactgtacctttttctctatgcgaccttctacttcttcaccaaactagagattacaaagccagtgtccggtatcctgtacttcggatacatgctcgttgcttcgtatgcattctttgtgctgaccggcaccattggtttctatgcatgcttttggttcacaagattaatctattcgtccgtgaagatagactgaggatcatttcggtgtatctgtcaaagcgcgcaatttgtatctgataggtatatcttgtcc

SEQ ID NO: 3220 - DNA, 302 bp, Lilium asiatic
  Clone ID: LIB3230-001-P1-K1-D8
cccacgcgtccgggaaacaacgggtccgccaccgtctctgtcgcccccgccgcccctgtagcgggagtggagtggcaccagcggcctgcgaacccgaagaaccccatcgtcttcttcgacgtcaccatcggctccatccccgctggccgtatcaagatggagctcttcgccgacatcgctcccaggaccgccgagaacttcaggcagttctgtacgggtgagttcaggtttttctctacatttacgacagttcctataccgggttggcttattaaaagcatgaattctcttttggttcacgt

SEQ ID NO: 3221 - DNA, 60 bp, Lilium asiatic
  unsure (1)..(60): unsure at all n locations
  Clone ID: LIB3230-001-P1-K1-D9
gtgtagatcgattggcagtgagctggatggcgctgtgagttttagncacagccatattaa

SEQ ID NO: 3222 - DNA, 63 bp, Lilium asiatic
  Clone ID: LIB3230-001-P1-K1-E10
ggattccggtcacccacctccgacgaccactgacgctgatataagctttgggcgatttttttt

SEQ ID NO: 3223 - DNA, 191 bp, Lilium asiatic
  unsure (1)..(191): unsure at all n locations
  Clone ID: LIB3230-001-P1-K1-E11
acggaggnagcggcggcggcggcgggcagttgtgagtgatcagatatgtgcagagcatgcggctagcatgcggcgactcgtgacgttgtatgcttcaatccgngaggatgcggcgggatttgaagagatcatcgtagttgaagaattctttcaagaacagcggagatgaacgggaactcacgagataagac

SEQ ID NO: 3224 - DNA, 239 bp, Lilium asiatic
  Clone ID: LIB3230-001-P1-K1-E7
gccagaaatatcttaaaccacatttgcagcctgagtaatttcagtgtggctgaaggagtacacggatggtagcttaaagccgttcaaaaagtcggagccgatccctgaaactaatgatgaacctgttaaggttgttgtggctgacaacattcatgatgtggtttctacctttgggaagaatgttcttatcgaattttatgttccatggtgttggtgtttcttgtttataattctttttt

SEQ ID NO: 3225 - DNA, 229 bp, Lilium asiatic
  Clone ID: LIB3230-001-P1-K1-E8
ggggggggggggggggggggggggggggggggggggggggggggggggggggggggggggggggggggggggggggggggtgggggggggggggggggggggggggggggggagggagggggggggggggggggggggggggggggggggggggagggggggggggggggggggaggggggggggggggggggggggggggggggggggggggggggggtggggggggg

SEQ ID NO: 3226 - DNA, 376 bp, Lilium asiatic
  Clone ID: LIB3230-001-P1-K1-E9
cacaaattgataaaattatttgcgctacaaaattacgcctggatctcgctcgccgatcccgtctgcccctcccctccggcgatctcaagatgaacatcttcgccaagaaacccactgccaaagaggcactcagggcgagcaagcgagagatgacaaatgcaactagaggcctcgaacgggaaattggcacattgcaagcagaagaaaagaagctggtagctgaaataaagaggtcagctaaaactggaaatgaggccgcgacttaaattttagcccgtcaacttatcagattaaggcaacaaattgctaatctacaaagtagtcgtgctcagatgcgaggtatagctactcatacgcaaggcatgcatgcccatac

SEQ ID NO: 3227 - DNA, 217 bp, Lilium asiatic
  unsure (1)..(217): unsure at all n locations
  Clone ID: LIB3230-001-P1-K1-F10
gacgccgaannccggcgcccacgcgtcgtgatataaagccgatctctaatggcggttgtcttgtaaccaatttatcaagaaagggtgatttgttacatattgctaaaccagaagaagccatgtccgtaactaaaaacgagccggtatgggttgaaagtcacatatcagttttaacagaatcacatgatgaaaagagccatgttcataatggggatgg

SEQ ID NO: 3228 - DNA, 491 bp, Lilium asiatic
  Clone ID: LIB3230-001-P1-K1-F11
agagtttgtcttaagaacaagttgaataggcgggttgtcacaattgatggttatgtcgacgttccttcgagcaacgaaaagcttttgctccaggctgttgcaacccaacctgttagcgtaggaatatgtggcagtgagagagcattccagttgtattcaaagggtatcttcactggcccatgttctacatctttggaccatgctgtgctaattgtgggatatggttcagaaaatggagttgattactggattttgaaaaattcttggggaacaagttggggattgaatggatatatgcatatgatccgtaacaatgggaattcaaaaggcgtatgtgggataaacatgcttgcatcttacccgactaagactggttcgaatcctccttcgcctgacccaagtccaaccaaatgcagtcttttgtcatactgtcccgcaggaaacacttgctgctgcacttggcgtgtatttggaatatgtctttcttggag

SEQ ID NO: 3229 - DNA, 309 bp, Lilium asiatic
  Clone ID: LIB3230-001-P1-K1-F12
ccgtcccgattccccgtcagctacgcgtccgtacgcatataaacacgtattattattattattttatatcaatatacccatcatataccgttgttttgtgtatattcatcgatactcttacttagtttagttgatatgccttctgcattctcttctaatcatgaagttgatttgaccccggttttgaaattttagtattatgtcactaaaacgtcattttgtcttggtacttattagtacccgataattgagtacatagtttaggattatgccaatgaatgatttttaagatataattgagtattcttg

SEQ ID NO: 3230 - DNA, 471 bp, Lilium asiatic
  unsure (1)..(471): unsure at all n locations
  Clone ID: LIB3230-001-P1-K1-F2
gcttttgaatgcttctatgcattatggattcattgngtttgttgcgagaccttgcatcagctgtctatacatatttgctgtgtggaaattgtatgtttaattgatggaataaggcaatgtatatagatattgagaggcctgccaatctttgtgtgagtattgacgactttgtctgaaccgttactaatcaaaggttcgttctccatggcatgtaacaccaatgctgcaactggaaactgtgagcttgcaaaaaggatggatatgtcgcagctctaaagagaaagagatgggtaatatctctccaggctctcatatgtttatgcttatagatttgtatgctgtactcatgcctatgatcctgttagcttagtaaggcattgcttgcaataggattttgttgaactgagatatgcttgagtttatgatcactttttgaggttttagctatggttggaatgatgaaattttaag

SEQ ID NO: 3231 - DNA, 82 bp, Lilium asiatic
  unsure (1)..(82): unsure at all n locations
  Clone ID: LIB3230-001-P1-K1-F4
agagccagancncaaanggcggtttttatgtttccaatacatcaagaaagggggagtcgcgacatatcgctaaaccgagggg

SEQ ID NO: 3232 - DNA, 428 bp, Lilium asiatic
  Clone ID: LIB3230-001-P1-K1-F5
cagagcaatccggtgtcactgccccctggtggttaaggagaaggagaaggagaaggagaaggagagttaaagaaatacaggtatgggtctgccagagatctagcagggcgtcatcaatctacaacagtttgtaatcatcatcctgtgtcgcggggggtttctttttacaagtctcatctttcaactaatactgatacaagtgatacctttaaggcatcacaaggagttggtcccgatagaagaatttctagtccagctacaattttgactgatgaggagtcgagtaagattttgcatttcgaaacaaccaagaaagaattttcgcatgccacaagagttaacaatgaaacctctgatgatattgaagaaggttctataggcgagacgaagaaacaatttaaagatctttcagatcaactattttcgtc

SEQ ID NO: 3233 - DNA, 180 bp, Lilium asiatic
  unsure (1)..(180): unsure at all n locations
  Clone ID: LIB3230-001-P1-K1-F7
acaagaggnaaaagagngaacngtttttattaaaagannnacggcgacacaaagagcggacaaaatatgagccatgaaggctcaaccaaccactaggatacacccaacaaaggttcagacattccgagggaaaaaaagtgatgcacggaagcacgatgaccacgggggggaagaagacaa

SEQ ID NO: 3234 - DNA, 320 bp, Lilium asiatic
  Clone ID: LIB3230-001-P1-K1-G1
caagaatttgcgctaagtgtcgatggtgcttccctctaaatgtggctcagaagtcgagcgacctcgacaatggcctcccagtgtccatgtccccctccgactcgagcgaagaagtcgtgcatctcctcaccgacctcaaaatcgagttcacatcttctccctccgacggtgggtcgccggtatggaagctcgacagctctgagcccaacggccaacgatatgggacactaaatgggtcttcgcataacgaaatcaaccagggatacatgttcaaaattgaaaaagcacgtgctttgggctacatactgctttactgcccc

SEQ ID NO: 3235 - DNA, 358 bp, Lilium asiatic
  Clone ID: LIB3230-001-P1-K1-G10
gcgactcctccggttcatggatctcttgcttatcaggtggtgcatccttcagatctgtgttttaagctcccagatgactggagcttagaggaaggcgcaatgtgtgaacctcttagtgttgggatccatgcttgtcgccgggctggtattggtccagagaagaatgtgctgatcatgggagctggaccaattggattagtcacgatgcttgctgtccgagcttttggggctccaagaattattatatcggttgttgatgtttaccgtttgtcatatgcatagtttctttgtgctgagtttttgtttttgtgttgttttattttttcttgttcttttttttcatttttcttggtatttc

SEQ ID NO: 3236 - DNA, 417 bp, Lilium asiatic
  Clone ID: LIB3230-001-P1-K1-G11
cggacgcgtgggtcaagaacagatattatacttgtgtttctgcacatgtttgatgcaactctgcatgctatgttttttgctggttaataagaacagagctatatgaggttttagctatgggttgcaatgatgaaactataagtttgataaacattgatgaataaatttctaatgctaggaaggcatgacgatgcaaccagcagtagagctaaactctgagcattaaatgagaaacaaaagtgcctcttgttatttgcattgcattttcaataaaagtaagtgttttctaatgacatttcatgcttctgtgcgaggatacccgaattctggaaaaagaacaccccaaaagagacgttggcaaatgggtggcacagatgatgcggtggatttgtacggctttgatggattacttatccg

SEQ ID NO: 3237 - DNA, 450 bp, Lilium asiatic
  unsure (1)..(450): unsure at all n locations
  Clone ID: LIB3230-001-P1-K1-G12
acgaaanccaaangaccaancnaancaacacnttttctttcatcaatcgataatgctaccgggggtgacaaccattgcttcaccagggacagcattcacactcnattcatcaccgactcaaaacagaccctttcagttgccagtagctactgagatattcacagaagaaacggaaccactgaaacaattagaatcagcacgcacttcgaggaatctgcaagaaactgaatcgaagcccatgggcggagtgccttctctatattttgaaggtcaagtgttatttgtggaaggggcgcacggtatgcgcaggggtgatgtgctaccaaaggggccggataacgagatatacatcccgcattcgcatgggtaggaaaactgaactggttgatgtgtcccggctagaaattaaggaagtctaagaaagtgactctctaattgctatgatggtga

SEQ ID NO: 3238 - DNA, 468 bp, Lilium asiatic
  Clone ID: LIB3230-001-P1-K1-G4
cccacgcgtccgcaaagagacgcaccgctatgagatatgttgaaactttttttattctattgaaattttgtaaattcaacattctgcaaatattataaaggatcgattggcctagaaaatagggtagcagaactgcagcctctgcttggattcgaattctgcattaatagtctgcattcttcgtagtggtgagagtctgcattcttcgaagtggccagaagagtgatatcaattgcatcctcgccttctttgctagcaaagtctatattattgattagagattttattccaaatttcaatcagtagttatatcgcgtgcttaaatattggggaccatctattaatgattgtagatctcaccagacgaattgattgtgtgagagatggtgtttttcccgattgttgctgtcatgtaagaggtttggaatcttgagacaattttcttgattaaaaaatggttatgcaagt

SEQ ID NO: 3239 - DNA, 295 bp, Lilium asiatic
  Clone ID: LIB3230-001-P1-K1-G5
aaaataccttctccgatccctcaccgtttctcttcggaccagcattcgtcttcgccggcgaacgccgccaccgttatccgcgctcccgccgccgcctctcctctccaattatgaacaatctcttaacggattcgtttgagatcccgcggggtcagagctcgagagacgatgatctcgaagcgggattgcagccatcagcgtataacgctgatgaagccttagctggattctttaaaaaggtacaagagattgagaagcagattgagaagctcgctacactatcaaagaagctgca

SEQ ID NO: 3240 - DNA, 112 bp, Lilium asiatic
  Clone ID: LIB3230-001-P1-K1-G6
gccgggattgaatcgacatactccaagctcccttattaccaccattggtatccaacaacggcagaacagaggagttcaagcaacgggactacttttgatctcagtatagctg

SEQ ID NO: 3241 - DNA, 82 bp, Lilium asiatic
  unsure (1)..(82): unsure at all n locations
  Clone ID: LIB3230-001-P1-K1-H10
tcccggtcgaccacgcgnccgcggacgcgtgggcggacgcgtgggcggacgcgttgtgtgttttacctaaactatgggaaga

SEQ ID NO: 3242 - DNA, 273 bp, Lilium asiatic
  Clone ID: LIB3230-001-P1-K1-H12
gcctcccgagatcccaatcctaccccttcattttttcttggccggccggagtcaggcgagcctcctgctccagaagcaactccgagatctcatgaagaacccggtagatggcttctccgccggcctggtggatgacagcaatgtgttcgagtgggcggtgacgatcatcggacctcccgacacgctctatgatgggggctttttcaatgcaattatgagctttcctgaaaagtatcccaatagttctccttcggatagatttacatcagatat

SEQ ID NO: 3243 - DNA, 124 bp, Lilium asiatic
  Clone ID: LIB3230-001-P1-K1-H2
tgaaagcaatggttcgtccagtatggcatcttgtttgtgaggtcgttcggcactactcgaggctggagtttccatcaaatgcgcaggtgctcaaattgctactggtatactttttaacacacta

SEQ ID NO: 3244 - DNA, 395 bp, Lilium asiatic
  Clone ID: LIB3230-001-P1-K1-H6
aaaaaaaaaggagggaaaaaaaaaaaaaggagaaaggaaaaagaaaaataaaaaaaaaaagaaaaaaaaaaaaaaaaaaagaagaaaaaaaaaaaaaaagaaaaaagaaaaaaaaaaaaaaagaaaaaaaaaaaaaaaaaaaaaaaaaaaaaaaaaagaaaaaagaaaaaaaaaaaaaaaaaaaaaaagaaaaaaataaaaaaaaaaaaaaaggaaaaagaagaaaaaagaaaaataagaaataaaaaaaaaaaaaaaaaggaaaaaagaagaaaaaaaaaaaaagaaaagaaaaaaaaaaagaagaagaaaagaggtaaataaaagaagaagaggaaaaggaaaaaaagaaaggaaaaaaagagaaagagaaaaaaaaaaaaaaaaaagaaaaa

SEQ ID NO: 3245 - DNA, 291 bp, Lilium asiatic
  Clone ID: LIB3230-001-P1-K1-H8
gtcacgaggcccacccgccccgacaaggcccgtcttctttgctacaaggcgaagcagggatatgttgtttaccgtgttcgtgttaggcgtggaggccgcaagaggccagttcccaagggtattgtgtatggcaagcccaagaatcagggtattacccaacttaagttccagaggaacaagaggtccgtggcagaggagagagcaggcaggaaattgggaggactgaaggtcctcaattcttactggattaacgaggattcgacctacaagtactttgaaatcattcttgtt

SEQ ID NO: 3246 - DNA, 345 bp, Lilium asiatic
  Clone ID: LIB3230-003-P1-K1-A1
attcgatgggcgccgctctaaatgtaacaatgttctatccgcatccatgcagctgaatcgcatttcttagtgggaccgaaagggaattcaatggccgcattttacacaccaggacagggtggattcacaccgactttgctgcgactcataacatcggactgcatgagtcactgaacggctgcctgaagtctgatttggcaggtgacccaacccgttatgcactgacattcgacatataaggggcatgggcaacgctctggaaagcagtattaaacgggacatgcgaggtgtccaagcacaacagagccccttccctggtaaaaccattggcaactattctttacg

SEQ ID NO: 3247 - DNA, 336 bp, Lilium asiatic
  Clone ID: LIB3230-003-P1-K1-A10
atcaaaatacaagagataccattgcgaaagccaggttttaataggagagattcaaatacagatataggcacaaaccaaacagatccaacacttgagttaagatttggaaaatttacacaacaaaccacaaaagtaactgccaatcacacacttcgataaaaactgcagaaacaaccacacatataatttccctgttcagactaggatcagttatgttcctcagtaggtaatagcattgtctccagcttcaccagagtccagattctcacttgattcgccactggtggctttctcatcttcattatccttcgcactctgctcgcttctcaagctact

SEQ ID NO: 3248 - DNA, 384 bp, Lilium asiatic
  Clone ID: LIB3230-003-P1-K1-A11
cagcacttgggggctattagctttaaagctcgctgatacggagattttaccctttgattacattgcctatgcttctgagcttcagacaagcacaaagacatctgaagatggagtgcaggggatgccagtaagttttgctcccctgtacaagtctataaaggagctgaagaaagctgccatcgatattgataatgagcgaaaggaactgaagtcggggaagaatccatcgaaagtgagagagctgaacgacaggttgatgatggccgagcgagcttttaccgatcgagacggactttctgagagagaatggtacaaacatctgatctatggaccttcgaagcacaacgactatggttcgaagtcgttcccaggaatagatgacgc

SEQ ID NO: 3249 - DNA, 375 bp, Lilium asiatic
  Clone ID: LIB3230-003-P1-K1-A12
cggacgcgtgggttcggagttgaaggagagtacaatgttcttgtgatggacctgttgggacccagtcttgaagatctatttaacttctgcaatagaaaattgtctttgaagtctgttctgatgcttgctgatcagatgataaaccgggtagagtttgttcacactaaatctttcctgcatcgagatatcaaaccagataattttcttatgggcttgggaagacgagctaatcaggtttacatgattgattttggccttgccaagaagtacagggacacttcaacccaccaacacatcccatatagagaaaacaagaatttgactggaacagcgagatatgcaagcatgaacacacatctgggtatagagcaaagc

SEQ ID NO: 3250 - DNA, 394 bp, Lilium asiatic
  Clone ID: LIB3230-003-P1-K1-A3
cgaaaagctcgaggaacttaagaaaatgttaactggattggagattgaggtgaggaatacaggtaagaaaggagaaggcgtacttaatgatggggtaggtgctgatttcgtgcagaaggacaaggttcttcctgatgggtttggtcctcgtgatgttggagtacggtgtgcaagtttggatggtgatgccgacaggcttgtttactttcgagctacgtcaacttgtaatagtagcatcgagctcattgatggagataaaatactatctctttttgcagtatttatcaagaaacaattaagtattctctatggcaatgacaaggatgtgagagtgaatgaaatgccagtgaggcttggtgttgtgcaaacggcatatgccaatggagcatcaact

SEQ ID NO: 3251 - DNA, 396 bp, Lilium asiatic
  Clone ID: LIB3230-003-P1-K1-A4
cgaaaagctcgaggaacttaagaaaatgttaactggattggagattgaggtgaggaatacaggtaagaaaggagaaggcgtacttaatgatggggtaggtgctgatttcgtgcagaaggacaaggttcttcctgatgggtttggtcctcgtgatgttggagtacggtgtgcaagtttggatggtgatgccgacaggcttgtttactttcgagctacgtcaacttgtaatagtagcatcgagctcattgatggagataaaatactatctctttttgcagtatttatcaagaaacaattaagtattctctatggcaatgacaaggatgtgagagtgaatgaaatgccagtgaggcttggtgttgtgcaaacggcatatgccaatggagcatcaactga

SEQ ID NO: 3252 - DNA, 379 bp, Lilium asiatic
  unsure (1)..(379): unsure at all n locations
  Clone ID: LIB3230-003-P1-K1-A5
cgcttatacaggnggcgctgctctgcacgcagggctcaccgttggatcgaccgaggatgtcggaggtggtaagtatgctggaaggcgatggtctttccgagaaatgggacgagtggcagaaagtcgaagttttacgacaggaggtggagatggcggcgccacaccgtagctctgaatggatcctcgattctactgataatcttcatgcatttgaactctctggcccgagataacattgagcataagaaaatgagtttttgtattttctttgtagggctacgctagtgcgttttgtaagtttcattatgtatgaatttaaattcatgtgtgcatatgaatagattgacttattatattaaaaaaaaaaaaaaaagggcgg

SEQ ID NO: 3253 - DNA, 357 bp, Lilium asiatic
  Clone ID: LIB3230-003-P1-K1-A6
cgcttatacaggtggcgctgctctgcacgcagggctcaccgttggatcgaccgaaaatgtcggaggtggtaagtatgctggaaggcgatggtctttccgagaaatgggacgagtggcagaaagtcgaagttttacgacaggaggtggagatggcggcgccacaccgtagctctgaatggatccttgattctactgataatcttcatgcatttgaactctctggcccgagataacattgagcagaagaaaatgagtttttgtattttctttgtagggctacgctagtgtgttttgtaagtttcattatgtatgagtttaaattcatgtgtgcatatgaatagattgacttattatatt

SEQ ID NO: 3254 - DNA, 372 bp, Lilium asiatic
  unsure (1)..(372): unsure at all n locations
  Clone ID: LIB3230-003-P1-K1-A7
acgcgtccgccctacaaaattangnactgcatgctttcatcctatgcaccggttatatctgctgaaaaggcttaccatgagcaactttctgttgctgagatcacaaacactgcttttgagccttcttcaatgatggcaaaatgtgacccccgccatggcaagtacatggcctgctgcctcatgtatcggggagatgttgtccccaaggatgtcaatgctgcagttgccaccatcaagaccaagcgcaccatccagtttgttgactggtgccctactggatttaagtgtggtattaactatcagccgcctactgtggttccgggtggtgaccttgccaaagttcagagggcagtttgcatgatctccaactct

SEQ ID NO: 3255 - DNA, 318 bp, Lilium asiatic
  Clone ID: LIB3230-003-P1-K1-A8
agggataaaaaattatacatttaatgctttcatactatgcgccgattatataatgagggaaaaggttaaaattaacgactgtctgttgccaacatcacaactactggacactgagccttcttcaatgatgacaaaatgtgaaccccgccatggtaagtacatggcctgatgtctcatatatccacgcgatgatagccctaagcaacagaatcctacacttgacaccataaagaccaagcccactatccaattatttaactcgtgccatactggatataaaagcagtgtgaactatcattcgccaactccctaaccccc

SEQ ID NO: 3256 - DNA, 366 bp, Lilium asiatic
  Clone ID: LIB3230-003-P1-K1-A9
gacccacgcgtccgggtcaagaagatagcgcccaccactaatgttaatgagcggggatctggatcgggtgacgagagccaacttaactaaggccatgtcccaaactgacagcatcaacacacaattcaacctgatcagcctgcaactgaaaaagtggcggataatttagaaaggttcctcacctaacaccaaaaggacctgctagtcacacagcccaatagatgctggatgggacccgtccgatcgaagttcgatgtacaaaacgcgatctggtgggaccattaatgaggaaaccgtttacaattccgatgtaccagagccaaggacttgaatggattcgccgatcaagggtggctcgaagggatg

SEQ ID NO: 3257 - DNA, 394 bp, Lilium asiatic
  Clone ID: LIB3230-003-P1-K1-B1
atgggcaggaccccaaatatcagaatgcactagctcaaacaaagtagatgaagcaaaattgctggttgggaatgagagggcagtaaacttcgccattttacaaccaggacaaggtttattcggaccgataaggatgcgacacagaacatcggactgggtgagtaactgaagtctgacatgaagtctgatttgacaggtgacccaaccgtctatgcctcgacattagacatatcaatgacataagcaaaagtagtggaagcagtagcagaaggaacatgcaagtagtccaagtaatacagagcccccccccgcctagaaccatcgccaactatcctgcacgtgcgcggatcctgcacaacacaagaagtgaaagagaaagtagttgtcagtccaa

SEQ ID NO: 3258 - DNA, 375 bp, Lilium asiatic
  Clone ID: LIB3230-003-P1-K1-B10
ggacaagatcacacagctcacggataatgtttatgtttgtcgatctggatcggctgctgattcccaactcgtctctgattatgtccgatacttccttcatcaacacacaattcaacttgctcagcctgcaactgtcaaagtcgcggctaatttagttaggttgctggcataccagaacaagagcatgctgcagactggcctaattgttggtggatgggacaagtacgaaggaggtcaaatttactctgtgccccttggtgggacaattttgagtcagccttttacaattggaggttccggttctagttacttgtatggcttctttgatcaagtgtggaaggaagggatgagcaaagatgaggctgagaaattagt

SEQ ID NO: 3259 - DNA, 383 bp, Lilium asiatic
  Clone ID: LIB3230-003-P1-K1-B11
cggacgcgtgggcggacgcgtgggcccagatctacttgtggtgaggaatcaccgagaactcaccattttgccctaatcgcaatccattcgcgagatctgatcggagatggcgaaggagggagcagtgatccactgccacaccgtcgatcaatggactcaacagcttgagcaggccaatcagaacaagaagctggtggtgattcatttcactctaacagggtctggaccttgccgtataatggcccccatctttgctgatctggctaagaagtttgtcaatgttgttttcctcaaagtcgacgtcgatgaattgaagtcggtggccaaagattgggcgatagaagcaatgccgacctttattttcctgaaggagggaaccatct

SEQ ID NO: 3260 - DNA, 384 bp, Lilium asiatic
  Clone ID: LIB3230-003-P1-K1-B12
cggacgcgtgggcggacacgtgggcccagatctacttgtggggaggaatcacggtgaactcaccattttgccctaatagcaatccattcgcgagatctgatcggagatggcgaaggacggagcagtgatccactgccacaccgccgatcaatggactcaacagcttgagcaggccaagcagaacaagaaccagctggagattcattttactctaacagggtgtggaccttgccggataatggccctcatctttggtgatgtggctaagaacatggacactggagctatcctcaaagtcgacgattaagaattcaagtaggtgaccggagattgggcgattgaaggcatgccgacctttatttttctgaaggaaggtaccatctt

SEQ ID NO: 3261 - DNA, 380 bp, Lilium asiatic
  Clone ID: LIB3230-003-P1-K1-B2
aaatatcagaatgtactagctcaaacaatgtagatgaagcggaattgctggttgggaatgagagggcagtaaacttcgccattttacaaccaggacaaggtttattcggaccgataaggatgcgacacagaacatcggactgggtgagtaactgaagtctgacatgaagtctgatttgacaggtgacccaaccgtctatgcctcgacattagacatatcaatgacataagcaaaagtagtggaagcagtagcagaaggaacatgcaagtagtccaagtaatacagagcccccccccgcctagaaccatcgccaactatcctgcacgtgcgcggatcctgcacaacacaagaagtgaaagagaaagtagttgtcagtccaa

SEQ ID NO: 3262 - DNA, 234 bp, Lilium asiatic
  unsure (1)..(234): unsure at all n locations
  Clone ID: LIB3230-003-P1-K1-B6
ccgggnggaccaacccgtccggggccgcaagggagtaactggggtgattctaagcttacaccaacgggattctgcggatgtctacgagcaaccatatcgtcaagaccaaaaccatgtatggcgggcgacatgaatccgataaacaatatcatcttgatctacttacaaaggatttcacatcaatccataggtcttggatatcagagctttattgtaatgacacacacaaccctg

SEQ ID NO: 3263 - DNA, 381 bp, Lilium asiatic
  Clone ID: LIB3230-003-P1-K1-B7
cgcctgacacataacgcctatgtctcctcttttccaacaccaaatgctgctgccacatttgtccgttctccctcatcacacccctcctacccagctgctgcggctcctctctatccttatgacaggacagtgggacatggtgtctatggtagccgaagccctccagctctaagggatccttacgctgcatactcaccagaagtggtaccttctgctgttcttggatccccatactcccctgctccaatgcactatccaccctatggtgggtacaccaacggaggctacaacaatgttctgtcacctggatatcaaccgtcacctggatatcaaacggcttactaccggtaggatcgatgctgataccttgacaaaatggta

SEQ ID NO: 3264 - DNA, 369 bp, Lilium asiatic
  Clone ID: LIB3230-003-P1-K1-B8
cgcctgacacataacgcctatgtcttttcttttccaacagcaaatgctgctggcgcatttgtccgttctccctcatcacacccctcctacccagctgctgcggctcctctctatccttatgacaggacagtgggacatggtgtctatggtagccgaagccctccagctctaagggatccttacgctgcatactcaccagaagtggtaccttctgctgttcttggatccccatactcccctgctccaatgcactatccaccctatggtgggtacaccaacggaggctacaacaatgttctgtcacctggatatcaaccggcacctggatatcaaacggcttactaccggtaggatcgatgctgatacctt

SEQ ID NO: 3265 - DNA, 392 bp, Lilium asiatic
  Clone ID: LIB3230-003-P1-K1-C1
cggacgcgtggggccagattcccagttacttgatattgctcggttttgcaacagatttcccaacatagacatgtcatatgaggtgctggaaagtgatgacataagccccggagagaatgtaacattgcaggttactcttgaacgtgatcttgaaggccgttcagaagtaggaccagttgatgcccctagatatccgaaggccaaagaagaaggatggtggcttgttgttggcgataacaacaaccagttactcgccatcaagagagtggcgctgcaaaggaaatccaaagttaagcttgttttcactgctccttcagaagctggagagaagtcgtatacgatctactttatgtgcgactcgtatcttgggtgtgatcaagagtatacattta

SEQ ID NO: 3266 - DNA, 387 bp, Lilium asiatic
  Clone ID: LIB3230-003-P1-K1-C10
accgctgcttatgggaaaagaaacaaagttccacaggaaaatataccaaacgtcacagcagaaagagtgaaaacagagatgcttgagggtgtagaaactgctcttggattatccaagggatcactttcacaaccgttttatacacgagtgcaactatggggtgcagcacttccaactaacactccaggagttccttgcatctttgaccctcatgggcgagctggtatatgtggggactggctgctcgggtcaaatgtcgaagctgcagtgttaagtggaatgtctttagccaaccgaattgcagattatttccagagcggtggaagtgaacctgatgattttgccatgggtttgcatcagacgtttgaggcagttgaaggtcatgat

SEQ ID NO: 3267 - DNA, 388 bp, Lilium asiatic
  Clone ID: LIB3230-003-P1-K1-C11
ggctattttcttctatttgaaaataatgttaaacacagtggtgtatgcacgtgacaaatggctgatagatgacggacttgtgttgccagacaaagcgtctctttatttgacagccattgaggatgctgaatacaaagaagacaaaattgaattctggaataatgtttatgggtttgacatgagctgcatcaagaaacagtcgatgatggagccacttgttgatacagttgaccagaatcaaatagtcaccaattgtcagttgcttaagacaatggatatttcaaagatgtctcctggagatgcttctttcactgcatcattcaagctcgtggcagaacggaatgattacgttcatgctcttgtggcgtactttgatgtctcatttacc

SEQ ID NO: 3268 - DNA, 372 bp, Lilium asiatic
  Clone ID: LIB3230-003-P1-K1-C12
cggagatttattctaagtcgatggaacgggaaattccggatgacttcaacattagaagaaaagaagtgactattggagagaagcttgaacagaagttcctgaaagatggtagaatagctttgccagattgggcgagtgacataactactatcttgtggattactgtccgcgctattgaagacacgctagcaagaggcacatctgcaggttatccccaaagtctgaatgttgccgatggaatgaggacagcgactgtaaagcttgtaataggagctatactcaaccaatgattcgaaaggacgattgttttgcagtatactgaacccttgcgggtcaatacacgtgttgccgacatatgctagaatgggactt

SEQ ID NO: 3269 - DNA, 398 bp, Lilium asiatic
  unsure (1)..(398): unsure at all n locations
  Clone ID: LIB3230-003-P1-K1-C2
agcgnccgcggacgcgtggggccagattcccagtttcttgatattgctcttttttgcaacagatttcccaacataggcatgtcatatgaggtgctggaaagtgatgacataagccccggagagaatgtaacattgcaggttactcttgaacgtgatcttgaaggccgttcacaagtaggaccagttgatgcccctagatatccgaaggccaaagaagaaggatggtggcttgttgttggcgataacaacaaccagttactcgccatcaagagagtggcgctgcaaaggaaatccaaagttaagcttgttttcactgctccttcagaagctggagagaagtcgtatacgatctactttatgtgcgactcgtattttgggtgtgatcaaaagtttcattt

SEQ ID NO: 3270 - DNA, 331 bp, Lilium asiatic
  unsure (1)..(331): unsure at all n locations
  Clone ID: LIB3230-003-P1-K1-C3
ccagntactttttattgctcttgtttgcaacagatatcccaacatacgcatgttttataatttgctgaaaagtgatcacataagccccggagagaatgtaacattgcaggttactcttgaacgtgatcttgaaggcccctcacaagtatgaccagttgatgcccttagatatccaaaggccaaagaacaaggatggtggtttgttgttggcgataacaacaaccagttactcgccatcaagagagtggcgctgcaaaggaaatccaaagttaagcttgttttcactgcttcttcttaagctcgtgaaaagtcataatactatctactttat

SEQ ID NO: 3271 - DNA, 373 bp, Lilium asiatic
  Clone ID: LIB3230-003-P1-K1-C5
acgggctatttttttttatttgaaaaacaagttgaacacaggggggtgtgcacgtgagaaatggttgatagagaaccgacttgcgttgggagacaaagagttattttaattgacagccattgaggatgctgcatccaacgaagacacagtagccctgtggaataaaggatatggggttgacatgaactataccaagaaccatgtgatgatggaagcacgtgattatacagtgaaacaaaatgataatcacgctatgtgggggacgcttaagacaatggataagtcaaagatgtctccttgagatgactctttcactggatgattcaagctcgtggcagaacggaatgattacgttcatgctcttgaggggtac

SEQ ID NO: 3272 - DNA, 340 bp, Lilium asiatic
  Clone ID: LIB3230-003-P1-K1-C6
cggacgcgtgggcgtcaccggtgtcaaactaagcttagcccgccgagattctcccgccctccatcatcagccaagatgtcaagacgaagaagatgaatggtttgcgacatgaaaaagataagttatattatttgtatctacttaaaaaggctttcacttcagtttctagttcttcgttataggagcattattgtttgggcacacacacacctgcgtaggcacatacataaatatacacatatataggggtgtagttgaagtaagttattcgtactagtttacttgtgcattttatgtattattatgaatgttattaacaacatactcgttgaaaacgaca

SEQ ID NO: 3273 - DNA, 375 bp, Lilium asiatic
  Clone ID: LIB3230-003-P1-K1-C7
gtgccacagttttctctgtgcaatactgtggcagagcggaagtgatagaccatacaatgaatgtaaaaaacaatctaatcgaggactttaaatcttcgattcgcttggactacacagatattgactccgaccatgcaaatcctcaaatgtgcagcctttatgcccccgagatatatactaacttgcgtgctgcagagcttgttcgaagaccgtcttctgatttcatggaaactttgcagcgagatatcactcagagcatgcggggaatcttaattgactggcttgtagaggtttctgaggagtacaagcttgttccagatacactgtatctcactgtttatattatcgaccggtttctttctcaaatttttattg

SEQ ID NO: 3274 - DNA, 184 bp, Lilium asiatic
  Clone ID: LIB3230-003-P1-K1-C8
ggaccacatcatacttttcacaaatttgtttcatagcggacgagctagaccgtgcgctgattgcaaatttcaatctaattatggactatacatccttcattaactcacactacacctatatcaacctccaccatgcaaatcctcaaatgatcaacctatatgcccccgatatacataccaacat

SEQ ID NO: 3275 - DNA, 236 bp, Lilium asiatic
  Clone ID: LIB3230-003-P1-K1-C9
ggcccgcatcatactttccacggctttttttaaccaacggcgatatcgaccgggggatgtttcccaactccactgtcatcctcgcccgacccaactctatcagcacataattcaacgaagaactgctcgcaaccgacatagtctctattgaatccatagggtgcgctgacttacaagaacatgaccctgcattccaaccatataaggatcccatcggacgagacaaggatcgaaag

SEQ ID NO: 3276 - DNA, 393 bp, Lilium asiatic
  Clone ID: LIB3230-003-P1-K1-D1
gcgagcatgaaaatcttcagatagaacctgaatatagtgggatccaaagcgaggctgaagttcaagatattagccctgttgaagatgtaggtgatggttcctatgaaatagaggaagaaatttcttgtagtaaatctgatgctgagaagcatggaattcggttctttgataatggccgcgatctttctgttcccgatgttgagtttgatgaggatccaaagctgaatttgcccgaggaaaaggaggttaagtttgcttattctgagtcaaatgtttcttctggtgaaaatcaagattctcctaaatatacagagtcaaaggatgatgataagtatgatggatctggtcttccctgtgaggcatggtggaaaaggcatgcagcatgtttatatt

SEQ ID NO: 3277 - DNA, 308 bp, Lilium asiatic
  Clone ID: LIB3230-003-P1-K1-D10
ggctctcttcttgtattagaaaacaatgtttaacacaacgctgtatgcacatgggggagggttgatatatgactgacttgcgtacacagacatacagtatatttatattacagaaaatgatgatgctgaataccattaaaacaatagtgaatttatgaataatgttaatggcgtcgacatgtgctgtatcaagaaacattttatcatcgaaccacttgccgatacagtgcaccgactgcatatagtcaccaattgtcaagagcgtaagacaatggatattgcatagatgtctactgcagatgcttttt

SEQ ID NO: 3278 - DNA, 386 bp, Lilium asiatic
  Clone ID: LIB3230-003-P1-K1-D12
cggagatttatacgaagtcgatggaacgggaaattccggatgactccaacattagaagaaaagatgtcactattggagagaagcttgaacagttgttcctgaaagatggtagaatagctttgccagattgggtgagtgacataactactatcttgtggtttcctgtccgcgctattgaggacaggctggcaagaggaacatctgcagtttatccccaaagtctgagtgttgtagatggaatgaggacagtggctttaaagcttgagtttggagctttccacaaccaaatatttgaaaggaccattgcagtgcatttcactgatcccttccgtgtcagtacacgtgttgccgacaaatgcaataatgggactctacttttgcaggtg

SEQ ID NO: 3279 - DNA, 265 bp, Lilium asiatic
  unsure (1)..(265): unsure at all n locations
  Clone ID: LIB3230-003-P1-K1-D2
gcgtccggggagcatgaaaaacttcaaanagaatctgaatataaagggatacaaagcgagggtgtatttcaagaggtgagccttatactaaatgtacctaacngcncctataaaacacaggacgaaattccttgcagtaaatctcatgctgagaagcatggaattccgttctttgataatggccccaatctctctgttcccgacagtgatgttgcctaggatccaaagctgaatctgccccacgaaaaggaggataactttgctt

SEQ ID NO: 3280 - DNA, 396 bp, Lilium asiatic
  Clone ID: LIB3230-003-P1-K1-D5
gaagcctttcggaaaaaaatttctgacctacagttctaacgaagcggattgtgacattgtttcctcgagatgtcatcttgaggataagtttccaacttggtgttctgaaaatctctggaacaagaggaaacataagtggacaccagacaagttagcactaacccgttggactaaaggaacaggggttttcgaaactaatgccacaaaccatgtaaagaatgatttgcggacatataggttcacagaaaatgatgatcttgatgtttcgtcaatggattatatcgaggatagatcagctctggcccttgagctgaagcatgcaaggaatgatttgcaaacatataggttcagagaagctgatgatgatcttcttgcttcattgttggattatagcga

SEQ ID NO: 3281 - DNA, 276 bp, Lilium asiatic
  Clone ID: LIB3230-003-P1-K1-D6
agcgtccggaagcctttcggaaaaaaatttctgacctacagttctaacgtatcggattgcgacatcgtttactcgggatgatatcttgtgtataagtttccaacttggtgctctgaaaacttttggaacaagatgaaacatacctggtcacgagacaagctaacactctctcttgggactaaaggaacaggcgttttcgaaactaattgccacaaaccacgtaaagaatgatttgccgacatatcggttcactgaatatgatgatctcaatggctt

SEQ ID NO: 3282 - DNA, 379 bp, Lilium asiatic
  Clone ID: LIB3230-003-P1-K1-D9
cggacgcgtggggttgtagccttctgtttataattaaacggggaacaattattctggaggctgactcttcaaataaatgagggacacggccctgcaaaataacttgaattgttaagaaaatatgagtttacaacattttacctcttgtgatcctattcatgcttttattattgtaaaaatattttcttaatatttttatttttgcatctcacttcattccgaggaggtgcttgcctgctttggtaaatggagttgcttgattgttggattatgaaacatggatttttcaccattacattcctcgtccccatcattcccgacactgctgagtgggtacggtctgcgttgcctgaggcgtactaacggagaggcccgcacc

SEQ ID NO: 3283 - DNA, 177 bp, Lilium asiatic
  Clone ID: LIB3230-003-P1-K1-E1
aagagagtcatgtaagtggagtttttaaagctcaacaaagactcactgctgagaacttggttcggatttgtatacattcaaggatggccaaggcctagaatgggatttgagttcttgtgttgatcttccattgtagtttatttcaaatttcatcaatgaaatgcttttattgttcaa

SEQ ID NO: 3284 - DNA, 339 bp, Lilium asiatic
  unsure (1)..(339): unsure at all n locations
  Clone ID: LIB3230-003-P1-K1-E10
aattacccggccgacccacacgnncgcggacacntttttttttaccctactttgtataaccaaacggggaacaaacattgtgttattttacttttaaagaaatcaacaacacgaccctacaaaataactcgaattgtaaaaaaaatatgactttacaacattttacctctactgatcctattcatgctattattatcgaaaaaaaatacacttaatataacaatatttacatctcacttcataccaacaaagtgcttgcctgctttaacaaatagacattcatgattgctagattatgaaacatttatttttcaccattacatacctcttccccatcat

SEQ ID NO: 3285 - DNA, 387 bp, Lilium asiatic
  unsure (1)..(387): unsure at all n locations
  Clone ID: LIB3230-003-P1-K1-E11
agaaaaaanatatacccaaagccaaatgtgaagccccgagacccaccgacgcgggcacgagagagancactattgcaaaaaacagatgtcaaaaattagagcttgatggaaaataaaaattgccacagagggagagggacgtatcaacataatagtgacgaccaggccggacgataaaaagcagaacgatgagaagaccaaatagagttaatatcatcaaccacagaggaaatgatggaaacagcacagagcataaatagatacacaaagggagaagcaatcagcaactaattaggaaaggagagttaccatggaggagaaaaagtcaaagcggtgaaaatacaagagaaatggacctaggctagactgggactactaataaccaag

SEQ ID NO: 3286 - DNA, 385 bp, Lilium asiatic
  Clone ID: LIB3230-003-P1-K1-E12
agaaataatttctacccaaagccaaatctgatgccctgatacctattgatgcaaacacgagtatgatttttttttcaaaatacagatttaaaaaattagagctttcttgaaaataaaaattgccactgaattattggttagttttaacataatagttacgattatgtttgaagttaaaaagtttaactatgataagactaaataatgttaatattatcaaccacaaatgaaattatgtaaacaacaaataacataaatagatacacaaagtaagaagcaatcagaactaagtagtaggtggagttaccatgttggagataaagtcaaagtggtgaaaatattagagaaatggatcttgcgttggctggatttactaataaccaat

SEQ ID NO: 3287 - DNA, 392 bp, Lilium asiatic
  Clone ID: LIB3230-003-P1-K1-E3
gtttggctgggacaaggaccttgccaagaagatctggtgctttggccctgaaacaactggccctaatatggttgtggatatgtgtaagggagtccagtacctcaatgaaatcaaggattcagttgtggctggtttccaatgggcctcgaaagagggtgccctagctgaagagaatatgcgagggatatgttttgaggtctgtgatgttgtgctgcatgctgatgccatccacagaggaggtggtcaggttattccaactgctagaagagttatttatgcctcacagttgacagcgaaacccaggctgctggaaccagtttacttggttgagatccaggctcctgagcaagctcttggaggaatttatggtgttctcaatcagaaaagggggc

SEQ ID NO: 3288 - DNA, 259 bp, Lilium asiatic
  unsure (1)..(259): unsure at all n locations
  Clone ID: LIB3230-003-P1-K1-E5
cgtccggaaacagagngaaaaaaaggnngattacacaacgaacgtttctcaacgcgagggggattccaagggatgatatattaatgataagcacccaacaagacggcccgaaaaactcattagcaataatgaaaaaaagtagacaacaaacaaacaagcattaacacacgggactaaaaagaacataaccgtacgaaactaaatccacaaaccatacaaagaatgaatcgcggacatataccctcacagaaaatgacga

SEQ ID NO: 3289 - DNA, 298 bp, Lilium asiatic
  Clone ID: LIB3230-003-P1-K1-E7
ctgaaggatgtttttgatgacgtttattggtaataaatgggggcttttatacgttgttgacttccaacacctatcaaattctgccctactcctgctaaatctacactcaattcaacacaatcatcctttatccaagtaattcatatcctatccaataacaacaatggcacaccagaaaacataaccgctgtagacttactcaataatggatacatgggacgatcccgtaagactgcactttttctaaaggtcactagtaggcacaattactactaaattttttataattatatgtaca

SEQ ID NO: 3290 - DNA, 380 bp, Lilium asiatic
  unsure (1)..(380): unsure at all n locations
  Clone ID: LIB3230-003-P1-K1-F1
cgcgnccgaagagagttaagtaagtggactatttttatgaaagaaaacaacactaaactacggggacgattgaaatgtgtctgtactcaatgcctgacaaaacccataaactcttgtagaaaacgtataagaaaacaacagcatatctataaggcacttctatctcgtcttttgtgctaaagtgactaaaatgactaaacctattatctttgtatctttcgtaatagagaatgggtgggttgttcagcagcatattaatttaactaaaagaggatgaaagcccgggccataaaattccttatataaaatgtgaacgaaataaccttttttacaggtaaaataaaacctgactaaaaaaacttttagtagaaatataaaat

SEQ ID NO: 3291 - DNA, 334 bp, Lilium asiatic
  Clone ID: LIB3230-003-P1-K1-F10
ttttggcaaatgaaatatctattccataaagttaggcaaataagggtgtccaacaccaaggatcaaaggacaatatccaaaattactaccactattaatctcacaaacacattattcctcacaaaccacaagtccagagcccatcacgaaattaacatccagacctaacaataaccacggagaaggcagcacaaaaacttgagagagctgtcctggatcccacgcgtccggtaaaagcggaatatggatttgggagcgatgaagttaaacacaatgatacgattattcctgcatcttcaactttagtatacacggtggagttggtagactttat

SEQ ID NO: 3292 - DNA, 380 bp, Lilium asiatic
  Clone ID: LIB3230-003-P1-K1-F12
ggcgcaggaggtctccaccggtcatacgcaccgccaggccggctagcgcacccgactccacgccgacaatgttgatacagaaaagatcgaccgcatcggcgctaaccacagactacatagcgacattcgacacaagactaccctactcaaggaccagactcaacaattcagggaatacatgatggagtatgcgatccactccaacggactcctagacccaccaaaggatcttgctgacattgcagagtctctccttggagccatactcctggacaaggacagctctctagatactgggtggaaggatataggaggctagctgaaccattgatcaatgaggaaacgataggaaagcacccagggaccgagctacacgagct

SEQ ID NO: 3293 - DNA, 388 bp, Lilium asiatic
  Clone ID: LIB3230-003-P1-K1-F3
cggacgcgtggggacgagccagcttccgagtaccagactattcctcttaataagagcgaggatttcggggttcactgtaaacagtattattcactggatataagctacttcaagtcttcgcttgataaccacctcttggatctgctgtggaacaagtactgggtgaacacgctctcgtcgtctccactcttgggtaaccgggactatgttgcggggcagatatctgatttggctgagaagttggagcacgctgaaaatcagcttgctactacacgcatgggttcttcttccttttcatcctcacggaagaaagacgagtctcagcttgcaaagataacccgtgatagctcaaaaattacaggggagcaagtacatggtctcatgtcgc

SEQ ID NO: 3294 - DNA, 343 bp, Lilium asiatic
  Clone ID: LIB3230-003-P1-K1-F4
gtcgcgactttcactgataggcttcgtgagctagggttggtgttcgaagataaccaccgggatgccctgaagcgactgaccgagtgtacgtctgagataaaaatagtgaaggcttacttagcagagcagttcaacgagaaagagaagctgaagagtgaaaagcatgaactggaagagagactgaaatatagggaaggcttgatgtcgatatcgaaggaaaaggaattgacgaagatggtggaactcgaaaagcggctgaaggcgaaggaagaggaggtgcttgcgaaggacgaggagaagcgggaggctataaggcagttgtgcttgctgatcgagtatcacc

SEQ ID NO: 3295 - DNA, 403 bp, Lilium asiatic
  unsure (1)..(403): unsure at all n locations
  Clone ID: LIB3230-003-P1-K1-F5
gcctcctctcccagttatcaaaatgtacactgcaaggaggaaaatccagaaggacaagggtgtggagcccactgagtttgaggactctgttgctcaagctttctttgatttggagaattctaatagcgagctgaagagtgaattgaaagacctgtacattaactcagcagttcaactggatgtagccaacaacaagaaggctgtagttgttcacgtgccctacagacttcggaagtcgtataggaagattcatgtgaggcttgtcagggaactagagaagaagttcagtggcaaggaggtgatcgtgattgccactcggaggatagtgaggccgccaaagaaaggctctgctgttgtgcgtnctcgcagccgcacactcaccgctgttcatgaagctatattg

SEQ ID NO: 3296 - DNA, 327 bp, Lilium asiatic
  unsure (1)..(327): unsure at all n locations
  Clone ID: LIB3230-003-P1-K1-F6
ggganggaagcgtccggtcgcctatgcgagcgatcaaaatgttcactgcaaggtagtttttcctccaggacggctatgtgacgcgcactgagtttgaggactctgttgctcaagctttctttgatttggagaattctaatagcgagctgaagagtgaattgaaagacctgtacattaactcagcagttcaactggatgtagccaacatcaagaaggctgtagttgttcacgtgccctacagacttcggaagtcgtataggaagattcatgtgaggcttgtcagggaactagagaagaagttcagtggcaaggattgtgatcttgatt

SEQ ID NO: 3297 - DNA, 368 bp, Lilium asiatic
  Clone ID: LIB3230-003-P1-K1-F7
ataaacgcatattttcaccaaaacccttctcaatatgtggggggaccacccggccgtgagtcacactcatatacataaaacatgacgttgtcaaagcccaaataaagaaaaatggaaacactttgaggtccagcatggtaatgaggatacatacagagaaatgcttcgtattagccgcagtgtgtctgctagttacagtcagacacatttcatcctccccgagtatttaatgcaaaaagatcagaagttgaacctagaggaagcggtggacactttaaagcgtgcaggggttcctgatgattaaatggcttctttagaaagacaattagctcctgcgcctgcaagtgcagcttctaataacagtggta

SEQ ID NO: 3298 - DNA, 171 bp, Lilium asiatic
  Clone ID: LIB3230-003-P1-K1-G1
ggtttctttaacctgggaggccgatcctttaaggggaaccaacactgttctacgaccaccaaggtccttggtctttactgaatgcctaaattaagccttaaactctcgttgaagacgtttaagaaaccaccagcttttttttaaggcacttttttttcgcttttggggcta

SEQ ID NO: 3299 - DNA, 388 bp, Lilium asiatic
  Clone ID: LIB3230-003-P1-K1-G11
ggcgcaagaggtctttaccggttattttaacctccaggccggctcgctcaccgggctacgtgccgggaatgttgataccgagaagttcgcccgcatcgccgtcaaccacggcctccatagccacctccgccacaagactcccctactcgaggaccagattcaacaattgatggaatccattatggagtttccgatccactccaacggactcctcgacccaccaaaggtccttgctgacattgttgagtctctccttggagccattttcctcgacagtaacagctctttagatactgtttggaaggtatttaggaggctagctgaaccattgatcaatgaggaaacgataggaaagcacccagtgaccgagcttcacgagctttgtcag

SEQ ID NO: 3300 - DNA, 388 bp, Lilium asiatic
  Clone ID: LIB3230-003-P1-K1-G12
ggcgcaggaggtcttcaccgcttatccgcacctccagtccggctcgctcacccgcctccgcgccgtcaatgttgatacggagaagttcgcccgcatcgccgtcaaccacggcctccatagccacctccgccacaagactcccctactcgaggaccagattcaacaattcatggaatccattatggagtttccgatccactccaacggactcctcgacccaccaaaggtccttgctgacattgttgagtctctccttggagccattttcctcgacagtaacagctctttagatactgtttggaaggtatttaggaggctagctgaaccattgatcaatgaggaaacgataggaaagcacccagtgaccgagcttcacgagctttgtcag

SEQ ID NO: 3301 - DNA, 355 bp, Lilium asiatic
  Clone ID: LIB3230-003-P1-K1-G2
ggtttctttaactaggtagggcgatacttttaatggaaacattactgatctacgagcaccaatgttcggtgtctttactgtatgccttaattaagccttaaactctccgagaagacgtataagaaaacaacagcatatctataaggcacttctatctcgtcttttgtgctaaagagtctaaaatgactaaacctattatctttgtatctctcgtaattgacattgagtggatgtttagcagcgtcttaattcaacgaaaagaggatggatgccccggcaaataaaatccatatacaaaatgtgaaggaaattagctctcttttacaggtataacagagcctgacagagaaaagaa

SEQ ID NO: 3302 - DNA, 311 bp, Lilium asiatic
  Clone ID: LIB3230-003-P1-K1-G3
ggcagaataaggtggacgaatgtggtgttgggttaattaaaacctaaggaacacatcaattcatataagacaaactcttagtttttttattatcgagtggatggatatggtgtcgggttaaaggacctttcaaggataacatgatccccgggggcgggcccgacaagactaagaactcaatggcccttaacgttttttttatgcaagccgggttgagggccgaaggtaaaagtcattgggtggcccttaatatttatgatcgttgatccgagtcgtgagtggtagaccatgcgacctttaatttttatgat

SEQ ID NO: 3303 - DNA, 402 bp, Lilium asiatic
  Clone ID: LIB3230-003-P1-K1-G5
ctatctgttacacaaccctgcgagttcaccacatctcaatttgaatatgaacctgtaggtaatctgatagattgtgatacggcagtttttcctggtcaagctgttccaagtccaaatggcccattttcttatgaaaggaaagaaagtctagataattctgaagctgtcacttcgagccttgatggcagtgaacccatttatgaaggagaagaacacatactggattctggacatgcatcatttaatgatcgagagccagtgtatgaaggtgagatggtcctagctgagcaagctgacaagttggaggatgacgcctgttctgcaatttccaaacatgcccttcaacaaaaatgtcaattggtaaagacttttctcgagaacaacgcaagccagttgacaatc

SEQ ID NO: 3304 - DNA, 381 bp, Lilium asiatic
  Clone ID: LIB3230-003-P1-K1-G6
gctatctgttacacaaccctgcgagttcaccacatctcaattttaatatgaacctgtaggtaatctgatagattgtgatacggcagtttttcctggtcaagctgttccaagtccaaatggcccattttcttatgaaaggaaagaaagtctagataattctgaagctgtcacttcgagccttgatggcagtgaacccatttatgaaggagaagaacacatactggattctggacatgcatcatttaatgatcgagagccagtgtatgaaggtgagatggtcctagctgagcaagctgacaagttggaggatgacgcctgttctgcaatttccaaacatgcccttcaacaaaaattgtaattggtaaagacttttctcgagaa

SEQ ID NO: 3305 - DNA, 382 bp, Lilium asiatic
  Clone ID: LIB3230-003-P1-K1-G7
ataaacgcataaaagcaccaaaacccaaccaatatgtgtcgtcaccacccggcccccagtcacactcacatacataaaacatgacgttgtcaaagcccaaataaagaaaaatggaaacactttgaggtccagcatggtaatgaggatacattcagagaaatgcttcgtattagccgcagtgtgtctgctagttacagtcagacacatttcatcctccccgagtatttaatgcaaaaagatcagaagttgaacctagaggaagcggtggacactttaaagcgtgcaggggtacctgaagatgaaatggctgctttagaaagacaattagctcctgcgcctgcaagtgcagctgctaataacagtggtagaatggtgaattttg

SEQ ID NO: 3306 - DNA, 389 bp, Lilium asiatic
  Clone ID: LIB3230-003-P1-K1-H1
gatacatacaaattttcagttggtagtaagaccttggaggtcagtaagaaagatattgcttggaagagtgatcaggaccataagttcggcaaggatgtctatcccaagaatttccaaagcggaggcctgattggaggcgctaaacttaatgctagtatacctttaagcgagcaaacagatctaattgtttggatgcgaacagctgcactgcctactttcaggaaattgtatgggaagattgaaagtgacttggaaccaaatgagaaaataacagtgataattcagaataattataacacattcagttttggagggaaaaagaaactggttctttcaactacaacttggataggtggaaagaacaattttctaggcatagcgtatgtcac

SEQ ID NO: 3307 - DNA, 81 bp, Lilium asiatic
  unsure (1)..(81): unsure at all n locations
  Clone ID: LIB3230-003-P1-K1-H10
ggggacgcgccccgaagcggcacagnaagcgcggcgggggggggggngacgcgcagcgggaccgccacacaagccagcgcc

SEQ ID NO: 3308 - DNA, 321 bp, Lilium asiatic
  Clone ID: LIB3230-003-P1-K1-H12
ccggaacgagcgccgcgacggaatcgtcggggcgactccacgcgttcggattcgtagacgcttgtacatgttatgtgaaccttcaggtggagtggctcaccagtctaagtgactggaatgttgataccgacaagttcactcgcatcaccgtcaacgcacagcctccataaccaccttgcggcacaagactcctttactcagggaccagaataaacaattgatgggatccattatggagtttccgatgcactgcaaccgactcctcgaaccacccaaggtccttggtgacatagttaactctgtccttggagccatttctct

SEQ ID NO: 3309 - DNA, 323 bp, Lilium asiatic
  Clone ID: LIB3230-003-P1-K1-H2
gacacattcaggtggtcagatggggggttgaccttagaggtacctaaggaacacatcgcttgatatagggcacacgaccatatgttctattaggatgtgtatgcctagagtgtccaaagcagaggcctgatagggggcacttgacttaatgctagcgtaccttacaagactcaaacctatctgatcgttagcatgcgaacaattccactccctactttgacgaaatgtgataggaagagggagggcctctataaaccaaatcagagaatcacagcgatagtgcaaaatcatgctaacacatacagttatgaacggaaacagaa

SEQ ID NO: 3310 - DNA, 394 bp, Lilium asiatic
  Clone ID: LIB3230-003-P1-K1-H3
ggcagaataaggtggacgaatgtggtgttgggttaattaaaacctaaggaacacatcaattcatataagacaaactcttagtttttttattatcgagtggatggatatggtgtcgggttaaaggacctttcaaggataacatgatccccgggggcgggcccgacaagactaagaactcagtggcccttaacgttttttttatgcaggccgggttgagggccgaaggtaaaagtcattgggtggcccttaatatttatgatcgttgatccgagtcgtgagtgttagaccatgcgacctttaatttttatgatctgggccgtgagagccaaactgggtagacaatggactcaatgtttttctatgcgggcctaaaggccttgggtggcccttaata

SEQ ID NO: 3311 - DNA, 125 bp, Lilium asiatic
  unsure (1)..(125): unsure at all n locations
  Clone ID: LIB3230-003-P1-K1-H4
aaggaccngacaaggagaacaaganccccgggggcgggcccgacaagacaaagaacccaggggcccgnaaccgaacgaaaaagcaggccgggacgagggccgaagggaaaaggcagagggaggcc

SEQ ID NO: 3312 - DNA, 272 bp, Lilium asiatic
  Clone ID: LIB3230-003-P1-K1-H6
ttgaaaaaggcgcttatgtagctggtggaagagggtactatctgaagggaatgggtgttgacctgaacatggcactcataagctttgcactggcatttttgaggagacgaggttacgagcggatgcaaaccccatttttcatgagaaaagaaattatgggcaaatgtgcacagttggcccaatttcgatgaagaactctacaaggttacaggtgagggagatgataagtatctcatcgccactgcagaacaacctctatgtgcgtatcacat

SEQ ID NO: 3313 - DNA, 191 bp, Lilium asiatic
  unsure (1)..(191): unsure at all n locations
  Clone ID: LIB3230-003-P1-K1-H8
cggacgcctattcttttagactaccctanttaacaaaacgggcaacaaacaatcgcgaacctaaacatttataagaaatacccacacacaccatccaactctcttctatacccaaaccaatccaaccagaccccaaatcaccacatcccctccaacttatacccccattacccccaaaacatatcctcaat

SEQ ID NO: 3314 - DNA, 238 bp, Lilium asiatic
  Clone ID: LIB3230-004-P1-K1-A3
ccgaagccgttcaattgccattagaatggacagaaaaatctgatgtagattcgagcctccaacggagtcaaacatttggtcagaggttcatggggaacatgatggataacatttttcttagaaatcttacttctaaatctaagagtctctctgcagatgcccttgtaccatcgtcacctgtaaagatcccagagattgctgagtctgctcttgacaatgatgaaaagaacccgctgtt

SEQ ID NO: 3315 - DNA, 404 bp, Lilium asiatic
  Clone ID: LIB3230-004-P1-K1-A4
gacctacgcgtccgcggacgcttggctatttatagatgagatggtttcttaaccaacgcgtctctcctggcgggtccaaataattttttaacaacaaaacctattggatacacctcctactttcctatataacattataattaaggttatttataaggtatgtaatgacttacgattttctctcacttacccttttctccatcttattttatatgctcttaggcgctacgtgaattgtgtttcatatgatatctaaatgggaatctatgtactcaaccaatatctacttttcttttctatatcacaaaaatttcattaataaaatttaaactacttataattttttttagaaagatttttctaaacattttttttatttatcactaaatacttttcgtttataa

SEQ ID NO: 3316 - DNA, 185 bp, Lilium asiatic
  Clone ID: LIB3230-004-P1-K1-A8
agccgttcaattgccattagaatttactttaaaatccgacgtaaattcgaggccgcggcggattcaatcattttttcacatctacacggggaacatgacggataacatttttcttagaaatcttacttctaaatctaagagtcttctctgcagattcccttgtaccatcctcacctgtaaagatc

SEQ ID NO: 3317 - DNA, 307 bp, Lilium asiatic
  unsure (1)..(307): unsure at all n locations
  Clone ID: LIB3230-004-P1-K1-B1
ccacgcgtccggtgcgtgactggggcaggagggtatatcgccttatggctcgtgaagcttctcctgtccgggggctacatggtgcacggaaccgtcanagacccaaatgatgaaaagaattcccatttgaagaagttggagaaggcccaggaaaatctacaactattccaagcagatttgcttgactacaattctatagcttcagctattgcaggatgtgaaggagtcttccatgttgctagtcctgttcctttgagaaaagtggccaatccagaagttgaactatacaccccagctgtaacgggca

SEQ ID NO: 3318 - DNA, 247 bp, Lilium asiatic
  unsure (1)..(247): unsure at all n locations
  Clone ID: LIB3230-004-P1-K1-B11
ggccacgcgtncggcacagcctgttttatttgtttaaagngactgatagagagggcgggcgggtttgctttacttttcctgtatataaaagaaggggctgatgaaaatacataatatcttgagctacctctatcttgtttgtagaaagctatgttttggaggtgttgcaagtttttacccaagttcagtgtaatgtcgtatgtaaacatatttttgattttgcaggctttcatggtgtttcctacct

SEQ ID NO: 3319 - DNA, 244 bp, Lilium asiatic
  Clone ID: LIB3230-004-P1-K1-B12
cccacgcgtccggcacagcctgttttttttgtcgaaggtgactgatagagagggggggcaggtttgctttacttttcctgtatgtaaggttggggctgatgaagatgcataattctggagctacctgaatcttgtttgtagaaagctatgttttggaggtgttgcaagtttttacccaagttcagtgtaatgtcgtatgtaaacatattcttgattttgcaggctttcatggtgtttcctacgt

SEQ ID NO: 3320 - DNA, 342 bp, Lilium asiatic
  unsure (1)..(342): unsure at all n locations
  Clone ID: LIB3230-004-P1-K1-B2
ccacgcgtncgcgagcttcatggatttcggccggctgttcttttattcgtcgccctcgcgccacggtggggggggacacatgcttttgctctttttctatagctcgatctttcaagggtcgagatcgctgctgggggtggaggacggcgggaataatcggccaccgttttttacgatggccgatgatttgatggatgaggaatattacgatgagcagactccggaaaagaagcgccgcctcactcccgagcaggtgcacttgctggagctgagtatcgagtctgagaacaagctgtagccggatcggatgagctagctggcacgcatgctgtgacttcagcc

SEQ ID NO: 3321 - DNA, 410 bp, Lilium asiatic
  Clone ID: LIB3230-004-P1-K1-B3
cggacgcgtgggcataattcgggggtgaagaagatgggggagcttcagttagctgtcagattcacttgctcttctctgctcaatatgatgcatatgtattcacaaccgttgcttccgaagatgcactatctccacccgctctcagtgaaccagctggactacttgaggcatcaggcgacccagatagtctcgatgaggctgactcgagcggaaccgccaatgaggaaagaggttgttgagtatatgttggatgttggttctcacatgtggagtatgcgcaggagcaaagccaatttcttcaggattatgggcgtcttcagtggtttgattgcagttgggaggtggttcgatcagatttgccattggaagaacccaattactactgggttgattcatcttctgttcataat

SEQ ID NO: 3322 - DNA, 336 bp, Lilium asiatic
  Clone ID: LIB3230-004-P1-K1-B4
cttaatcaagcgcgtctcttctggggagttcaaataatttttcaacatgaaaacctattggatacacctactactttcctatataacattataattaatgttatttataacgtatggaatgacttacgtttttctctcacttacccttttctccatcttattatatatgctctttggtgcttgcgatttgaggatcatatgaaatctatatgtgtatctatgttctcaaccaatatctactttgctatcttagatcacaaaaatctcattaattataattaaattactaatattatttttagaaagatattactaaatatttttgtttttattact

SEQ ID NO: 3323 - DNA, 285 bp, Lilium asiatic
  Clone ID: LIB3230-004-P1-K1-B5
gggcgcgtgcacgttgcgctcaccgttcatatgaggcatgacatgggtcactcgcactcgagtgcccgttgaatcgggcgaggctgaagccgcggcaaattgggatgtaagacagagttcaggcggactggccgattcgaatcggtatctgacgttattgattagagttcagagtgcgatatgagtgcgatgcagaaataccgtggccatggggcattagagtgtgagcagattggttgacgagagtcaccgagagcgatagactgacaggggcggcgagaaccc

SEQ ID NO: 3324 - DNA, 244 bp, Lilium asiatic
  Clone ID: LIB3230-004-P1-K1-B6
cccacgcgtccggcacagcctgtttcatttgtcgaaggtgactgatagagagggctggcaggtttgcttcacttttcctgtatgtaagggtggggctgatgaagatgcataattctggagctacctgaatcttgtttgtagaaagctatgttttggaggtgttgcaagtttttacccaaattcaatgtaatgtcgtatgttaacatattcttgattttgcacgcttttatggtgtttcctacac

SEQ ID NO: 3325 - DNA, 318 bp, Lilium asiatic
  Clone ID: LIB3230-004-P1-K1-B8
cggacgcgtgggcataattcgggggttatagaatatgggggagcttcagttagctgtcaggggcacttgctcttctctgctcaatatgatgcatatgtattcacaaccgttgcttccgaagatgcactatctccacccgctctcagagaaccagctggactacttgaggcatcatgcgacccagatagtctcgatgaggctgactcgagcggaaccgccaatgaggaaagaggttgttgagtatatgttggatgttggttctcacatgtggagtatgctcatgagcaaagccaatttttttaggattatgggccgctt

SEQ ID NO: 3326 - DNA, 241 bp, Lilium asiatic
  unsure (1)..(241): unsure at all n locations
  Clone ID: LIB3230-004-P1-K1-B9
gcgntaagcggacgcgtgcacgtaccattatgggttttggattaggggggacgcaaagcatagcggggcgaggggaatgggttctttttttctcaaaaagaagcagaagcagacacaaccgaggagaacaaagatgcagtgggtcctcccgcccagagagaacaagctggagtattggatgaagaacggaacccaaacagacgtgctgaggctgacttgagcggaacaccgacgaggaaga

SEQ ID NO: 3327 - DNA, 289 bp, Lilium asiatic
  Clone ID: LIB3230-004-P1-K1-C1
cgtacgcgaactccatggattccttccgacttttcttttatccgccgacctcaccccacgggggggtcgaacacatcctttttcttctcaacagaaccaaaatctttcaaggggacagatcgcagcgcagggtgtaatgcaacgaaaacaaccctccccctgtgtctaaccaaggccgaaaacttgatcgaagaggaatattacagataacctaaccccacacaagaaacgctgacacacttccaagcagacgcacttactgcagctcattaacatgtcgcaaaacaac

SEQ ID NO: 3328 - DNA, 349 bp, Lilium asiatic
  Clone ID: LIB3230-004-P1-K1-C2
cggacgcgtgggctggattccaacaagaaagcgatgtctattcagtgcaaggtatgtatgcaaacattcatctgtaccacatcagaggcgaagtgcaaggaacatgctgaagcaaagcatcccaaatcagagctgactcagtgctttccccatcttaaatcatcataagagtgttccaagttaagaagcatctcgctccatcaaatcaacttatgtctatatatttcatctagagttgtgtaattgaaaccttgaatggtgtggaaacaatgctgtgtttgcatatttaaaccgagttttatgctgctttaatatcctagccaacatatgtgctctttaagacttttaa

SEQ ID NO: 3329 - DNA, 386 bp, Lilium asiatic
  unsure (1)..(386): unsure at all n locations
  Clone ID: LIB3230-004-P1-K1-C3
cacgcgnncggggacgcgtgggctgtattccaacaataaagcgatgtctattcactgcaaggggggtgggcaaacattcatctgtaccacatcaaaggcgaagtgcaaggaacatgctgaagcaaagcatgccaaatcagagctgactcattgctttccccatcttaaatcatcataagagtgttccaagttaagaagcatctcgctccatcaaatcaacttatgtctatatatttcatctagagttgtgtaattgaaaccttgaatggtgtggaaacaatgctgtgtttgcatatttaaaccgaggtttatgctgctttaatattctagccaacatatgtgctcttttagacctttaacaaaaaaatataccattttaagaactc

SEQ ID NO: 3330 - DNA, 396 bp, Lilium asiatic
  Clone ID: LIB3230-004-P1-K1-C4
cggacgcgtggctttatatagatttgaatgtctcttaatcaaggcgtctcttctaaggagtccaaataaatggtcaacaagaaaacctattggatacacctcctactttcctatataacattataattaaggttatttataaggtatggaatgacttaggtttttctctcacttacccttttctccatcttattttatatgctctttggtgcttgtgatttgtgtttcatatgaaatctatatgtttatctatgttctcaaccaatatctacttgactatctcagatcacaaaaatctcattaataaaatttaaattactaatattatttttagaaagatattacgaaatatttttgttatttatcactaaatactcttgttttatgatttaagca

SEQ ID NO: 3331 - DNA, 398 bp, Lilium asiatic
  Clone ID: LIB3230-004-P1-K1-C5
cggacgcgtggctttatatagatttgttatgtctcttaatcaaggcgtctcttctaaggagtccaaataaatggtcaacaagaaaacctattggatacacctcctactttcctatataacattataattaaggttatttataaggtatggaatgacttaggtttttctctcacttacccttttctccatcttattttatatgctctttggtgcttgtgatttgtgtttcatatgaaatctatatgtttatctatgttctcaaccaatatctacttgactatctcagatcacaaaaatctcattaataaaatttaaattactaatattatttttagaaagatattacgaaatatttttgttatttatcactaaatactcttgttttatgatttaagcat

SEQ ID NO: 3332 - DNA, 397 bp, Lilium asiatic
  Clone ID: LIB3230-004-P1-K1-C7
gtgttatggacatccttaatcttcggattcctccttacattcgcattgatttcgtccaactcagtctctcttattcatcaccaaagaaaaattatgtcaagtggaccgttaggattgcaagtattcatggaacgaaagctccactaccatttgtcaaatcagtggagatatcgttttcggagaggccggacctaaaagctgctttcttacaaaagcaacccttttacttgaaaagggagacggcaagaaagaggccgtttaaaatgatactcaaattcaacttaggggatggttgtggctgtccatgcacatcaattgagtgggaaatcgatttccaggccaaaaaagacagctttgtccttgataaagaagaagtggtccgaaagctgagagatgc

SEQ ID NO: 3333 - DNA, 322 bp, Lilium asiatic
  Clone ID: LIB3230-004-P1-K1-C8
gaccacgccggcgctcggcgcaccattacaacctttcgtactcagccgtgcgcatcaagggcggggtgctaacatttatttctgccacatcacatccgactcgaatgaacacgccgaagcaaaacatcccaaatcacatctgacttattgctttctcccatccgccaggatgataagaagggcccaagttcagaagcatctccctccatcaaatcaacttatctctatatatttcatatacagtagagtgactgaaaccctgaatggtgtggaaacaatgctccgttcgcttatataaaccgaagattatgctgctttaata

SEQ ID NO: 3334 - DNA, 394 bp, Lilium asiatic
  Clone ID: LIB3230-004-P1-K1-D1
gtcgaccggaaaagccgctgaaatggcagctgaagatgttgttgccgaaacccctgcccctgctcttggggagcccatggacctcatgaccgcccttcaagttgtcatgaagaaatcactggcccatgatggtctcattcgtgggctccatgagggtgccaaggcaatcgagcagcatgctgcgcagctctgcatcctggctgagagctgtgaccaacctgactatgtcaagctggtgaaagcactctgtgctgaccacaacgttcacttggtcactgtgcctagcgccaaaagccttggcgaatgggctgagctctgcaaatttgactctgagggtaaggcgaggaaggttgttggatgctcatgtgtggttgtgaaggattatggtgaggag

SEQ ID NO: 3335 - DNA, 403 bp, Lilium asiatic
  Clone ID: LIB3230-004-P1-K1-D2
cgagtttcatggattccggccggctgatctttgattcgtcgccctcgcgccaccgtggcggcggacacatgcttttgctcggcggcaggagctcgatctttcaagggtcgagatcgctgctgggggtggaggacggcgggaataagcggcgaccgttttttacgatggccgatgatttgatggaggaggaatattacgatgagcagacgccggagaagaagcgccgcctcactcccgagcaggtgcacttgctggagctgagtttcgagtcggagaacaagctggagccggatcggaagagcgagctggcacgcaagctgggactccagccgcggcaggtggcggtttggtttcagaaccgccgcgcccgttggaagacaaagcagctagagcgcgactatga

SEQ ID NO: 3336 - DNA, 391 bp, Lilium asiatic
  unsure (1)..(391): unsure at all n locations
  Clone ID: LIB3230-004-P1-K1-D7
cgtncgggagaccgaaaaatcccctccaacggttcttttatacgtcgccctcgaaccaccggggggggggacacatgcttttgctcaccggaagaacctccatctttcaagggtcaagaaagctgctgggggtggaggacggagggaataatccacgaccgttccataccaaggccgcagaatgcagggcagatgaatattacgatgagcagacgccggagaagaaacgccgtctaactcccgaacaggagcacttgctggaactgagtttacagtctgacaacaagcaggagccagatccgaagagcaagctctcacccaatgcaaatacttactctcgcggcaagtggcagaatggttttagaaccgtcacgcccgttggaagacaaaa

SEQ ID NO: 3337 - DNA, 329 bp, Lilium asiatic
  unsure (1)..(329): unsure at all n locations
  Clone ID: LIB3230-004-P1-K1-E3
cgcgtncgggncngcctactaccatctcaagccaattttttcacgtcttgcttgggatcggcgaccgatgactgttgcatttacatcaatcatggcaatcttcatcattgaaagggttgatgaggagactggaacttcatctattctgcctcttattattgctggcatcttaagcatcatatataggagattctttgatgatttacgcccatatgctgtagaccagtnnggtccatgcattgttatgccttagatggccatacttgtgcctacaatgtatacacattcctcttactggttatgggccttatgatttttatcttttagcc

SEQ ID NO: 3338 - DNA, 397 bp, Lilium asiatic
  Clone ID: LIB3230-004-P1-K1-E9
gagctgataggcttcagactggtatgagaggtgccttcgggaagcctttgggaacatgtgcccgggttagcattgggcaggtccttctctctgttcgctgcaaggacaacaatgggaacaacgcacaagaagctctacgtcgtgctaagttcaagtttcccggccgtcagaagatcattgtcagcaggaagtggggctttaccaaatataaccgcagtgactataatatgtggaaaggtatgaaccgcatagtcccagatggagtaaatgctaagctgcttggatgccatggccctcttgctaatcgccagcctggaagagcgttcatagatgctgttgccaaataggaatgacctacccgtggatgaaacattctcaactctttcagcatgttttg

SEQ ID NO: 3339 - DNA, 360 bp, Lilium asiatic
  unsure (1)..(360): unsure at all n locations
  Clone ID: LIB3230-004-P1-K1-F12
cgtncgggaaaagcagggctgctttgattcttatgtttttgaatcacaataggagagcggggggggggtcagagtattttttgctctaaaaaaaaaaccgcataagcatcaagagggttttacatcattttgatgaggagcaatttcattcttaaagtataggcttatcaaaattacctgtcaaagttaaataacacatgacctattcttaatctgtttatattgttgagagatatagtactgattctctatttcttgtacacaatgcatattaatcatcttatcacttttttataacacaattctttataaaatattatatttatctttaattataaaatttaattttttagtctttct

SEQ ID NO: 3340 - DNA, 256 bp, Lilium asiatic
  Clone ID: LIB3230-004-P1-K1-F2
cgtacaacagttacaaggaaactcacccgctatattttgcaccgccgaccacacgccagggtggggtgtcacacattcttttactcgcccacacgatctacatcatccaagggacgaaatcgctcctgcgaccggaagacatctctaataagccaccaccgttcattacaatggccgatgatttaatagacgaggaatattacaaccagcatactcccgaaaagaatcgccctctcactcccgagcaggtgcacag

SEQ ID NO: 3341 - DNA, 398 bp, Lilium asiatic
  Clone ID: LIB3230-004-P1-K1-F3
gttctgcctactaccatctcaagccaaatgatgcacgtcttgtttgggatcgtctacctatgactgttgcattcacatcaatcatggcaatcttcatcattgaaagggttgatgaggagactggaacttcatctattctgcctcttattattgctggcatcttaagcattttatattggagattctttgatgatttacgcccatatgctgttgtccagtttgttccttgcattgttatgcctttgatggccatacttgtgcctccaatgtatacgcattcctcttactggttatgggcagcaggattttatctcttagccaaagtggaagaagctgaggataaattgatctacaaatggactcatcatgtcgtcagcgggcatacccttaagcattta

SEQ ID NO: 3342 - DNA, 400 bp, Lilium asiatic
  Clone ID: LIB3230-004-P1-K1-F9
aaaatagataatccaaagggttttaagtcttgagttttacttcgatacaagagggctggcttcgagaattttgttctcaccaaaacatatcacatgattgatgaagatgatccaattctagagaaagcaatagggactaagattgtatggtatccaggcaagtgcttgacccagaaaactatggtaaagaagccaaagaagggatctaagaatactaagcccatcacaaaaacagagcagggcgagagcttctttaatttttttagccctccggaagtccctgatgatgatgctgatattgatgaagaagaagctgctgagctacaaaatcaaatggagcaggattacgacatcggatctactatccgagacaagatcatccctcatgctgtttcatggt

SEQ ID NO: 3343 - DNA, 393 bp, Lilium asiatic
  Clone ID: LIB3230-004-P1-K1-G1
gagatcttggtgctcaaattccactggaacaggtcccttcagcccaacaaaagatggggaaaacatgcaggcagctcaacaagccggttatcgtggcttctcaactccttgaatctatgattgagtatcccacacctacccgtgctgaagttgctgacgtttcagaagcagttcgtcagcgggcagatgccctaatgctttcaggcgagtcagccatgggccagtttccagataaagcactgagtgtcctgcgaaccgtgagcctcaggattgaaaagtggtggagagaggagaagcgccatgaaggcatggagctcccagatattgcatcttctttctcagacaaaatctcagaggagatatgcaattcagccgcaaaaatggctataattt

SEQ ID NO: 3344 - DNA, 350 bp, Lilium asiatic
  unsure (1)..(350): unsure at all n locations
  Clone ID: LIB3230-004-P1-K1-G10
cccacgcntncgggaaaagcanggcggcttggattctttgtttttgtaatcacaaccggagagcggggggtgtgacggtgtattgttgttggtgtaaaaaaaaaaccggagaagcagcacgaggggttgacatcagttgattatgagcaattgcattctttaagtagtggcgtatctgaattacctgtcaaagtcgatgaacacaatacctatgctgtagctgttgatgttggtgagagattgagtactgatgctctgtttcttgaacacaatgcagattaatcagctttttacgtttaagaacacaaggcagattaatctatttttgatgtttgtgagaaaattaattt

SEQ ID NO: 3345 - DNA, 398 bp, Lilium asiatic
  unsure (1)..(398): unsure at all n locations
  Clone ID: LIB3230-004-P1-K1-G2
gagatcttgnngctcatattccactttttcatttcccttcagcccaacaaaagggtngggagacattcttgcttctcaacaagccgnntatcgnggcttctcaactccttgaatctatgattgagtatcccacacctacccgtgctgaagttgctgacgtttcagaagcagttcgtcagcgggcagatgccctaatgctttcaggcgagtcagccatgggccagtttccagataaagcactgagtgtcctgcgaaccgtgagcctcaggattgaaaagtggtggagagaggagaagcgccatgaatgcatggaacttcccagatattgcatcttctttctcagacaaaatctcaaaggagatatgcaattcaaccgcaaaaatggctaataattttgg

SEQ ID NO: 3346 - DNA, 368 bp, Lilium asiatic
  Clone ID: LIB3230-004-P1-K1-G3
tgccaaccttaatcgatcgcaaggataatgtttttataatatcaaacccgaagtcaaagtatcctgtactgcaattagacctgaggttgatatctgatcttgtagtggtcattgtatctgcaacctgtggtggaattgcatttgcttgcgctggacaaccggtgattacaggttatttgcttgcaggatctgtcattggccctggtggctttagctttgtcagtgaattggttcaagttgaaactgtagctcagtttggtgtaatttttcttctttttgcattgggcctggagttctctatggcgaagcttcgggttgttcgggctgttgctgttcttggtggatttctccaaattattctgttcata

SEQ ID NO: 3347 - DNA, 393 bp, Lilium asiatic
  Clone ID: LIB3230-004-P1-K1-G4
ggaaaagcagggcggcggggagtctttggttgaggaatcacaattggagagtgttggtggggacggggaagttggtggtgtaaaagaaaaaccggagaagcagcaggaggggttgacatcagttgatgaggagcaattgcattctgaaagtagtggcggatctgaattacctgtcaaagtcgaagaacacaagaccgatgcggaagctgttgatgttggggagagattgagtactgatgctctgggtcttgaacacaaggcagatgaatcagctgtcgacgttgaagaacacaaggcagatgaatcagttgttgatgttggagagaaattgaatttggaggctccgggtctagaagccaagcaagaaccaaaaactgaacctgctgtcgaagt

SEQ ID NO: 3348 - DNA, 332 bp, Lilium asiatic
  unsure (1)..(332): unsure at all n locations
  Clone ID: LIB3230-004-P1-K1-G5
cccacgcgtncgggaaaagcagggcggctgcgattcttttttgtatgaatcacaaacggagagtggggggggggactgttatattttttttgtaaaataaaaaccggaaaagcatcatgaggggttgacatcacttgatgaggagcaattgcattcttaaagtagaggcggatcttaattacctgtcaaagtctaagaatacatgaccgatgctgaagctgatgatgttggggagagattgattacttgagctctaggtcttgaacacaaggcaaattaatctcttttctactttatataacacaatgctgattaaatcagttgttgatgtt

SEQ ID NO: 3349 - DNA, 278 bp, Lilium asiatic
  unsure (1)..(278): unsure at all n locations
  Clone ID: LIB3230-004-P1-K1-G6
cgtncggagctgataggcttcttactggtattagaggttccttcggcaagccanaggggagatggggccagattttctttggtcacgtccttccctctgtgcgctgcaaggacaacaatgggaacaacgcacaagaagctctacgtcgtgctaagttcaagtttcccggccgtcagaagatcattgttagcaggaagtggggctttaccaaatataaccgcagtgactataatatgtggaaaggtatgaaccgcatagtcccagatggagtaaatgct

SEQ ID NO: 3350 - DNA, 278 bp, Lilium asiatic
  Clone ID: LIB3230-004-P1-K1-H10
ccacgcgttcggatctccaatgatgatctcctctctgttttatttccctacactgagattgaaaagggtatgctgtgggaggtgtaagggaagtgggttgtccaaggagccctcaatgtagatattggtgcaaatccctcagctgaaggtggtgaagatgatgaaggggttgatgaccaggccgtaaaggtggttgatattgttgacaccttccggcttcaggagcaacctgctttcgacaagaagcagtttatggcatacatgaagcggtatgtcaa

SEQ ID NO: 3351 - DNA, 362 bp, Lilium asiatic
  Clone ID: LIB3230-004-P1-K1-H11
gcgtccggatctccaatgatgagctcctctctgtttcatttccctacactgagattgaaaatgggatgctgtgggatgttgaagggaaaagggttgaccaaggagccctcaatgtagatattggtgcaaatccctcaactgaaggtggtgaagatgatgaaggggttgatgaccaggccgtaaaggtggttgatattgttgacaccttccggcttcaggagcaacctgctttcgacaagaagcagtttatggcatacatgaagcggtatgtcaagcagttgacgcctaaacttgatgccgagcagcaggtgctatttaagaagcacattgagggggccattaagtttctgcttccgaagctc

SEQ ID NO: 3352 - DNA, 356 bp, Lilium asiatic
  Clone ID: LIB3230-004-P1-K1-H2
caggatcttcgatcagatggacgacttttgaggcaatctccaccaatatctggtgaaacgggagtaattactcaagcaaatggctcggctcgtgttagatcgtgtgccacataagttattgctagtgtcaaggccaaactgaagaaacccaaccctattcaacctgacatatggaagatatctatatttagcgactgtagtgcacacacagacctactgtttgagggcagacgtggtgaacaatcatcgacagagctcttaggctatctacaaagatacttattgcgtagcacaagcactgcacgtgctataatcgatctgtcacctgtcataagtgctgaggctaagagactctg

SEQ ID NO: 3353 - DNA, 399 bp, Lilium asiatic
  Clone ID: LIB3230-004-P1-K1-H3
cagaaaatcagcgactctatatgaagctgcttcttttcccagcacttctgctgatcatttccaccctcatcgttgacggtgctgttgtctatgatgcctccgggaacgcactcaaacctggcagtacctatttcatcaaatctgtcttgagaggggccgcaggcggtagcctgtaccccaattggtgcaaaaaaatttgccccttaatctatcctgatatctgccagcttaatgtcgcccagactaacagtgacctcgacgacggtgtacccgtcatcttcactccggcgaacactgacgacaatgttgtccagtacttgagtgatgtaagcattaagttccatgcccccaacatctgtactctatcgacagtctggcagctggccaaggccgacgaca

SEQ ID NO: 3354 - DNA, 382 bp, Lilium asiatic
  Clone ID: LIB3230-004-P1-K1-H5
gatctccaatgatgagctcctctctgattcatttccctacactgagattgaaaatggtatgctgtgggaggtggaagggaagtgggttgtccaaggagccctcaatgtagatattggtgcaaatccctcagctgaaggtggtgaagatgatgaaggggttgatgaccaggccgtaaaggtggttgatattgttgacaccttccggcttcaggagcaacctgctttcgacaagaagcagtttatggcatacatgaagcggtatgtcaagcagttgacgcctaaacttgatgccgagcagcaggtgctatttaaagaagcacattgagggggccattaagtttctgcttccgaagctcagtgatctgcaatttttgtgggtgag

SEQ ID NO: 3355 - DNA, 133 bp, Lilium asiatic
  unsure (1)..(133): unsure at all n locations
  Clone ID: LIB3230-004-P1-K1-H6
ggatctcaatgatgatctcctctctgtttcatttccctacactgagattgaaaaggctgggctgtatgtatgttggaacggaaccaaaccngncccaaaggagccctccaatgtataatatttgggtgcaaaa

SEQ ID NO: 3356 - DNA, 284 bp, Lilium asiatic
  unsure (1)..(284): unsure at all n locations
  Clone ID: LIB3230-005-P1-K1-A1
cggacgcgtgggtctatgggtgacaccttacgtggatgagtctgttgttgccgaagtcaattctagcattttagacatgtctccacagtnccccaaacagttaaagataaaaaatctctcaatctattaacttctaatccctatattaaaaggttacttctaaaaaagcagtagccgatgcttatattctttttccaaataaactaaaacgtgctaatgatcttccctcctttcttaaaaatctttacagggtgcccatttttccaatatcttactaacctttt

SEQ ID NO: 3357 - DNA, 400 bp, Lilium asiatic
  Clone ID: LIB3230-005-P1-K1-A11
gcgggaagcaccgcggattcagttggagagaacagtagtgatccatgtagtacaccatcggagccggttgccccggagactgttgggacgacagctgtagtagctgttatcagttcttcgcacatcattgttgctaattgtggggattcgagagcggtcctatgccgtggaaaacaagcagtgcctttatcggtggatcataaaccaaatagagaggatgaatatgcacggattgaagcagaggggggcagagtcatccagtggaatggataccgtgtgttcggtgttctggcaatgtcaaggtcgattggggatagatatctgaaaccatggattatcccagtcccagaagtcaaaattgttccccgaatgaaagaagacgaatgcctcatcctggcca

SEQ ID NO: 3358 - DNA, 287 bp, Lilium asiatic
  Clone ID: LIB3230-005-P1-K1-A12
gccggaaacaccatgtgttgaggtgtagagtgcactccagatccatgtagcacactgtttgagccggttgacacgaacactgctgggactactacctgaggctctgctttcagttcttaaggcatccttggtcttaattggagaagatttgagacacatcctatgatcgaaggaaaacaagcgtgagcctttatcggtggatcattatccaaatggtgatgttgaatatgcactgattgtatcaactggtgagcgtgacattcaatataatggataccgggtgaacg

SEQ ID NO: 3359 - DNA, 286 bp, Lilium asiatic
  Clone ID: LIB3230-005-P1-K1-A2
atcactccttagtccacccttccgctttcgccacccttctaatcctatacctagggcggacggtctattttatccattctaacatacgcacacatgcaacttcctaactcttgtatataaacacctaaacccatatacctgaacgtattcatacttctgcataactcgcaacaaccctgccctacccaatttaatgagccttcgtcacattccacaaactactgatggccatatatcgaataggtcccctcctatcacccttcacttttattcaacaaaccacaaa

SEQ ID NO: 3360 - DNA, 423 bp, Lilium asiatic
  Clone ID: LIB3230-005-P1-K1-A3
ctcactcgttaatccacgcttccgctttcgcgaccctactaattctagatcggaggcggacggtctatattatccattctaacctacgcacagcatgcaagcacaagacaatgccttgacaaggcaatatccatatttgcacaacgagatcattcaactggattactagcaataacacggaccttcgtgactttatcagctttcaatacttctcaaattctcctgaaggccttctatctaatatgctcctacctatcacacttcacttcactgtacaaacaccaaaacctgaacgtatggtagtatttaaaaactttacaattgagccgatgctgactatgggcagcaccaagtcagtgatatgggcagataacttgacagcagtaacagaagacggaagtttatcggctcaatttgagcata

SEQ ID NO: 3361 - DNA, 237 bp, Lilium asiatic
  Clone ID: LIB3230-005-P1-K1-A4
ctcactccttaatctaccctgctgcgttttccattcttctaattctagacctagggcggagggccttttatatatattatcattacgcacacaagctacgatactgtttttgtatataaacacgaaagcctatttacttgaacgaaatcatactactggattacaagcgtaaacacgtacctttgtagcctaatgagtcattattgcttgccattttctgcttaaggccatctattt

SEQ ID NO: 3362 - DNA, 400 bp, Lilium asiatic
  Clone ID: LIB3230-005-P1-K1-A6
cggacgcgtgggctagaaccaatcttccccccaaattttctatttgtggattgatattcaaattgtgacctaattgcctcatttctttttgcaggtttacccgtgtgaaggtgtgcgtgtggaggagctctgcagcctataaatggagccgagatgagcaagaggaggttgtcccctgtccccagtccagaatctattagcaaatgcatgtgagcttggaatggcgtgaatatttagttctggtggcaatgttggtgagcttggaatggcgtcccaaagcacccacttcagtcttctcggaagaggacggcgaatcggtgttatggctgtcatgcgattgggcttccgatatggggaacggctttcaatctcaaggagcaatgtggtatcaaccagggtc

SEQ ID NO: 3363 - DNA, 416 bp, Lilium asiatic
  Clone ID: LIB3230-005-P1-K1-A8
cggacgcgtgggtttgaatggctatcacggtgatacctctgcaacgttcctgtgtggtaatgttgacaatgaagtccagaagctggttgaggtaacaagagaatgccttgacaaggcaatatccatatgtgcaccaggagtggagttcaagaaaatcggcaaaactatacatgatcatgcagataaatctcggctgggtatagttcaagaatttattggtcatggtgtggggcgagtctttcattgtgatcctgctattcttcactgtagaaacaacgagcctggacgtatggtgttgggtcaaacatttacaattgagccgatgctgactatgggcagcaccaagtcagtgatatgggcagataactggacagcagtaacagaagacggaagtttatcggctcaatttgagcata

SEQ ID NO: 3364 - DNA, 375 bp, Lilium asiatic
  Clone ID: LIB3230-005-P1-K1-B1
gggtgacaccttacgtggatgagtctgttgttgtcgaggtcaatcctagcattttagacatgtctccagagttcctgagatggttaaggatgaaaaatctctcgagcgatgatcgtgtgatgctcatgaaagaaggttacatcaaagaaggcagcagcgtaagcgtgatgggcgtggtccaaagaaacgagaacgtgctaatgatcgtccctccttccgaagaaatctctacagggtgccagtgggccaagtgcatactacccgcaagcctcgaaggcattgtattgagatgcgaagatacttcgaagatcgatgtcttaccattgtagaagcaaaatatgtttttcgaggatatatgggtattacattgagttt

SEQ ID NO: 3365 - DNA, 402 bp, Lilium asiatic
  unsure (1)..(402): unsure at all n locations
  Clone ID: LIB3230-005-P1-K1-B10
gctggaaagaaggtcccggcctccaagggcaaggagggggagaagaagaagaagaggtcgaagaagtcggtggagacctacaagatctacatcttcaaggtgttgaagcaggtccaccctgacatcgggatctccagcaaggccatggggatcatgaacagcttcatcaacgacctcttcgagaagatggctcaggagtctgctcgtctcgcccgctataacaagaagaacaccatcacctcccgagagattcagacctccgtccgcctcgtcctccctggtgagcttgccaagcacgctgtctctgaaggcaccaaggctgtcaccaagttcaccagtgcttagtcttacggngtgtttaagactgatcgagcgtctgtacttggtagctgctattaacat

SEQ ID NO: 3366 - DNA, 403 bp, Lilium asiatic
  Clone ID: LIB3230-005-P1-K1-B11
gctagaaagaatgtcccgtcctgcatttacaggagcgctagaagaggaagaagaggccttttttatcttcttagacctacaccatctacatctacaaggggctaaaccaaaaccaccctaacataccaatctccatcatggccatgacgatcatgaacagcttcatcaacgacctcttcgagaccatggctcacgagtcttctactatcacccactataacatgaagaacaccatctcttttctagagattcagacctccatccgactcgtactacctggagagctagacaaacacactgcctctgaatgcaccaagagctgtctccaatttcaccagggctgattctgacagggttgataagactgatcgagcatctgctcttgataactgctattaacatg

SEQ ID NO: 3367 - DNA, 402 bp, Lilium asiatic
  Clone ID: LIB3230-005-P1-K1-B12
ggcggtgatactatttggggtggtctagactggtcaccagaagaaggttacgactgtattccgaaaaaacaaaggaacgagccgtgaactcctagctgaggctttccttaaagtcccaaaggagaccagtgactgtgatcgagaagaagtgagaaacatcctggatgaagtagaggagcgtgacccggtccgtgtagctgtgtatgtagagtctgctatgtttgatcgcatgggtgtctcaactggtgagcataaggctaaatataggtctatcatgttcaacttgaaggacagcaaaaacatagattttcgtaggagggttctgcttggggaagtgagggctgaggatatctgtgacttggcacccgaagaaatggctagtgatgagagaaaagctgcgaa

SEQ ID NO: 3368 - DNA, 426 bp, Lilium asiatic
  Clone ID: LIB3230-005-P1-K1-B2
ctttaatagcggttccactccacatagcttgaataaacctgaggatgatttattgctaaagacttctctgcaaaagagaagaccggggaccttcagcaaagagctggaagccaaggtcatagctctatttgaaaggtttaaaactgacaagaactgcagccaattgattgcaaatgctctggatgctgataacacatactctgcagcccaagtttaccgtaagctgagacagttgggcttacttgttcctcgtaaaaggttaactaaagcgtcaaaaaacctggaagaggaggaagttatcaaaacaacagagaattctgatgaagagaccttggtagcaattaaagacagatacaaaggaaaaaagagcaagccatctataaaggaggctgcgacaaagacaatttctcagcatggaggaacact

SEQ ID NO: 3369 - DNA, 421 bp, Lilium asiatic
  Clone ID: LIB3230-005-P1-K1-B3
ctctaatagctgttccactcaacatatcttgtattcacctcaggatgattcagggctggaggctgctttgtagatgagaagaccggcgaccttcagcaaagagctagatgccaaggtcatagatctatctgaaaggcataaaactgacaagaactgcagccaatagattgcaaatgctgtggatgctgataacacatactctgcatcccaagtttaccgtaagctgagacagttgggcttacttgttcctcgtaaaaggttaactaaagcgtcaaaaaacctggaagaggaggaagttatcataacaacagagaattttgatgaagagaccttattagcaattaaagacagatacaaaggaaaatagagcaagccatctataaaggaggctgcgacaaagacaatttctcagcatggagga

SEQ ID NO: 3370 - DNA, 384 bp, Lilium asiatic
  Clone ID: LIB3230-005-P1-K1-B5
ctgtcttcttaatctcgcctggtgcgttttccaggcttggcagtgtttgcctagcaaggagttctcttggaatatgttatcattgtttacaaaatctgggatgctgtttttggaaataagcttgatggcctttctactccaaggaaatcatgctggtggattggaagcgttgacacgtacctttgtggtctcaggagtcattgttgctggtgatatactgcttaaggccatctatttatttggttttggggtgccactgttcattgatagtgaagtaaccccaaaccgggtgaaatggggtttatggatcgtccacaagctgttgatctcttcagtttatggcctcattttgttcatgtaccactcgaaatggcgagaaagatt

SEQ ID NO: 3371 - DNA, 402 bp, Lilium asiatic
  Clone ID: LIB3230-005-P1-K1-B6
aggttttactggagcaggtgacatcctcaccttggaacaactttctcttcttgctgtactatggattagtcgttgagaaaagaccttggccgctagttaaggagaaaatcaagaaagattaccccaaactgcagttgacttcatggatgtttcggccggtcataggatggataaatcatcaatatatgccactccagttccgtgtgattttccatagcttcgttgcttgttgctggggaatattcttgaatcttcgagcaaggaccatcgctctgaaaaagtgatacaagatgtgaacatgttggttttgctgatattgtacttgaaatgattagcatatatttcctgattcaagttgggcacctgttgtgggagattatatattttttcttgaagtaagta

SEQ ID NO: 3372 - DNA, 206 bp, Lilium asiatic
  Clone ID: LIB3230-005-P1-K1-B7
agcgggaagtacttctagttgataattcactacactgcaaagaacgggtacggtgtccatttcacacttcaaaccctcgatccgggcacagttaactctttgatcgcttggtagaacctatatattccatggcttgttctgaaaaacagtgccaaccgtgctaaagtgatatagcgtctgatcacagatactgatagctgaccagt

SEQ ID NO: 3373 - DNA, 349 bp, Lilium asiatic
  Clone ID: LIB3230-005-P1-K1-B8
ctcgggcactactccgaggtgattagcccacacactgggaagtacgggtaatgtgtcgtttatcacactataacacctaggaccttgcccatagagctctcagccaggatcgtagatgcattagaatggttggaaactgcctaaaaccactgccaactgattgctaatgctatagcatctgatcacacatactgtggagcacaagtatacctttagctaccattgatggactgactcgttcgtagttcaaggttagctacctcgactgaaaacctgcaacagatggtacttgtcgatatcttcagagaactcgtgtgaatacacctcgatagtcattaacgacagatgc

SEQ ID NO: 3374 - DNA, 411 bp, Lilium asiatic
  Clone ID: LIB3230-005-P1-K1-B9
cacaattgatgcaaaatctggtatcagtggggcaggacgtggagcaaaggaggcaaacctttttactgaaatcacagaagggattcattcttatgcaattgcccagcatagacatattcctgaaattgaacaaggactctctgatgctttacaaagtaaagtaactgtcagcttcactcctcatgtcatgcccatgagccgtggaatgcaagcaaacatttatgtagagatggtgcctggggcaactattcatgatttataccaagaactgaacactgcttatgagggtgaagaatttgttagaatgcttgataaaaaaacaataccccagactcgaagcgtccgtggatcaaattactgcttaatgaatgtcttcgaagaccgaattccagggagagcgataatcatctc

SEQ ID NO: 3375 - DNA, 287 bp, Lilium asiatic
  Clone ID: LIB3230-005-P1-K1-C1
gggacgcgtgtgtcgagggtaacactttagatgcatgagacaacaagtggcagggcaagatcgagcattatagacatatgaagataagacaggcgaaagggtcggatatgggaagttttactaggtgactgcattaagctaatcaaagtaagttacttgataaaatgcaaacatccaagggagatgcgctaggagcaggaatcttaccagtgctactttcctgaccctgccgccaataaatagttacagggggacaaaaggccaagttcatactacacgcaagcctc

SEQ ID NO: 3376 - DNA, 398 bp, Lilium asiatic
  Clone ID: LIB3230-005-P1-K1-C10
gaaagagaaagagaagagagaaagagggagatatggcgctgaaggtgtatgggttgcctccgtcaaccaacacagtgagggtggaggctgccctgctggagaagaacttggagtatgagttcgtcctcgtcaacatcaccaccggtgcccacaagcaacctgatttcctcgcactcaacccattcagtcagatcccggttctcaccgatggagacatcaccctcttcgaatccagagccatcaccatatacgtagccacaaagtacgctggaactggccctgacctcctcggaagtgccatccccgcacctgcggcagctatagaagtatggctccaagtagagtcacaacagttcaacccacccatttctgccatcgtcttcgaactgctgatcaag

SEQ ID NO: 3377 - DNA, 401 bp, Lilium asiatic
  Clone ID: LIB3230-005-P1-K1-C11
cggacgcgtgggcggacgcgtggggaaggctcacctgatggagatccaggtgaatggtgggaccattgctgagaaggttgactttgcttataagttcttcgagaaaccagtcccggttgatgctgtcttccagaaggatgagatgcttgacatcattggtgtcactaaaggtaaggggtatgaaggtgttgtaactcgttggggtgttacccgtcttccccgcaagacccacaggggtctgcgcaaggttgcttgtattggcgcctggcatcctgccagagtctcctacactgtagcccgtgctggtcagaatgggtatcaccatcgtactgagatgaacaagaaggtttacaagcttggcaaggcaggggaggagtctcacaaggctctcactgagtttg

SEQ ID NO: 3378 - DNA, 383 bp, Lilium asiatic
  Clone ID: LIB3230-005-P1-K1-C12
ggcacacatgctctttcgcgtggggttggctcacctgatggagatggaggcgagtgggggttccattgctgaaaaaactgactttgctcataaattcttagagaaacctgtcccggctgatgctatcttccacagtgatgagatactatgacataattattgtgactaaaggtgaggggtatgaaggtgttgtaactgcttggagtgttacgcctctttccctcatgacccacaggtgtctacgcatggtcgtttgtattgacacctggcattcttgcatagtctgctacactgtaaccccttctgatctaaatgggtatcaccatcatactgagatgaacatgaaggtatacaggcctggccaggcatgggaagagtcttac

SEQ ID NO: 3379 - DNA, 108 bp, Lilium asiatic
  unsure (1)..(108): unsure at all n locations
  Clone ID: LIB3230-005-P1-K1-C2
gcgtccgggccgttccatgtggcgcttacggcgtcggatgctccttacaacaagtggcatggcaggagcgagtattattggtatatagaagatganagaggcgcaagg

SEQ ID NO: 3380 - DNA, 413 bp, Lilium asiatic
  Clone ID: LIB3230-005-P1-K1-C3
ggccgttccatgtggcgcttacggcgacggatgcgccttacaacaagtggcagtgcaggatcgtgtattattggtataagaagatgagagaggcggaagggtcggagatgggagggtttactagggtgctgcattcggggaagccggataatttgatggatgagatcccaacattcgtggtggatccgcttccagccggcatggatcggggttatgttgtcttgaacagaccatgggctttcgtacagtggctggaaaaagctaagattgaggaggattatattctgatggcggagccggatcacgtttttgtgaacccattgccaaacttgtctcgtgacagctacccagcagcatttccttttttctacattaaaccatccgaacatgaacagattataagaaaatacttt

SEQ ID NO: 3381 - DNA, 408 bp, Lilium asiatic
  Clone ID: LIB3230-005-P1-K1-C4
cggacgcgtgggcggacgcgtggggccggcgtctccgttgctgccaccggagctggctgcaggctaaggacgaattggagctaattgacactggagaaaatggcccgttccgcgaaagttgccaagaagcctgatggtctagcacaagcattgaaagtggctcatgctgtgaaatctggtgcttcaaccctgcaaacgaagggctagaagatccgaacatcggtgacctttcatcgtcccaagaccctgaagatggattgaaaccccaagtaccccagaatcagtgcccctgcaaggaacaagctagatcactaccagatcctcaagtatccactgaccactgagtgtgccatgaaaaagattgaagacaacaacactcttgttttcattgttgacatacgagctgac

SEQ ID NO: 3382 - DNA, 396 bp, Lilium asiatic
  Clone ID: LIB3230-005-P1-K1-C5
ggagaaggcgagcaaggggaggaaggaggaggtcgtcacgagggagtacaccgtgaacctccacaaacgcctccacggatgcaccttcaagaagatggctcccaaggccatcaaggagattagaaagtttgcccagaaggcaatggggactactgatgtgagggttgacgtgaagctcaacaagcaaatctggagcagagggattcgaaatgtccctcgacgagttcgggtgaggattgctcgcaagaggaatgaggaagaagatgctaaggaggagctctactcgttggttactgttgccgaggttcctgctgagggattgaaaggattgggaaccaaagtgatcgatgaagctgattgaagtctttaattatcacttaggttattgagacatct

SEQ ID NO: 3383 - DNA, 239 bp, Lilium asiatic
  Clone ID: LIB3230-005-P1-K1-C6
atcgaaaactaccccaaggagataagtctagactctgcgaagaacaagcaaagggagacctgacacatctttatcttcttaatatctccccactaggagactcccaccgtatggaaaaagctacacaccactcgggaggaccttaataacagagctgccgaagaaattgtcataaagcataccaacaaagtgcacgcagccgaccaaatcaactcactcgaccctgccgccaaagcaca

SEQ ID NO: 3384 - DNA, 411 bp, Lilium asiatic
  Clone ID: LIB3230-005-P1-K1-C7
attgggaagtacttcgaggagataagccaagacactgggaagtacgtgtttggtgtcgatgacacactgaaaactcttgatatgggcgcagtggagactttgatcgtatgggagaatctagatattacaaggtttgttctgaagaacagtgtttccggtgaaattgtcataaagcatttgagcaaggagcaggaagctgaccagagcaacttccgtgaccctgccgccaatgcggagttagaggtgcaagagcgtcttcctctactggagtggttcgccaatgagtacaagcgttttggttgtgcccttgagtttgttactaacaaatctcaagaggggtcacagttctgccgaggctttggagggattggggggattttgcgctatcagctggatataagatcgttcgac

SEQ ID NO: 3385 - DNA, 409 bp, Lilium asiatic
  Clone ID: LIB3230-005-P1-K1-C8
cgcagatcccactccgccgccatctgaagatatcaaggaagaaatgtgaaattttcagtctatgcagttggaaccgaaaggaaaaagcaaagatacggtgcccgaggaagttgaggaggaaaaggaagaagagaaaaaacgtcatttaaatgtagtcttcattgggcatgttgatgctggtaagtcaactattggagggcaaattcttttcctcagtggccaggttgatgatcgaactattcagaagtatgagaaggaagctaaggataagagtcgggagagctggtacatggcatatattatggacacaaatgaggaagaacgcgtaaagggaataacggtggaggttggaagagcacattttgaaaccgataacacaagatttacaatattggatgcaccgggccac

SEQ ID NO: 3386 - DNA, 409 bp, Lilium asiatic
  Clone ID: LIB3230-005-P1-K1-C9
cgcagataccactccgcctgcatctgatgatatcaaggaagaaacgggaaatgttcagtctatgcagttgtaaccgaaaggaaaaagcaaagatacggtgcccgaggaagttgatgaggaaaaggatgaacagaaaaaacgtcattgaaatagaaacttcattgggcgtgttgatgctggttagtgaactattgaagggcaaattcttttactcaaaggccagtgtgatgatcgaactattcagaagtatgagaaggaagctaaagataatagtcacgagagctggtgcatggcatatattatggacacaaatgaggaagaacgcgtaaagggaataacggtggaggttgtaagagcacattttgaaaccggtatcacaagatttacaatattggatgcaccgggccac

SEQ ID NO: 3387 - DNA, 413 bp, Lilium asiatic
  Clone ID: LIB3230-005-P1-K1-D1
gcagtctaagaacaaaaagaccgcattggaggatcagatgttggggaaagagtatgaggaatctcgcttagacacactaaattgtgcacttgataaaactattacggaggtggagcgacaccttgcaagcctccgcgaggaaagagattctgtcaattcacaaaggatgactagtagattggagatggccaaattacagaaggatgcacaggcagctgaggaagcttatctttctgctgaacgtcgcttcgccactattcttgcttctccgtggtaatggtgactaaactttgggaaatagctggatctgatagacctgggatagttgagttctgtaaaaggttcagaatggtcacttttgttccatgttagaaatttatttttgccctcattttctaaggtaattcgagaat

SEQ ID NO: 3388 - DNA, 180 bp, Lilium asiatic
  Clone ID: LIB3230-005-P1-K1-D10
gacagataaagagaatatttaaagatttaaaaacagcgcagaaagaggagggggtgagtcttttaactttcacacaacaagaaaaggccgccctgcgggagaagaactaggagaaggagttcgtgccttacaacaacaccgccggtgcccacaaacatccatgatttcacgagcacacaa

SEQ ID NO: 3389 - DNA, 265 bp, Lilium asiatic
  Clone ID: LIB3230-005-P1-K1-D11
gacagagaaagagattattgaaagatttagatatcccgcagaaaggggatgggggtgacttttttaaccatacacagcagagggaagtggctcccctgttggacaagaacttggagtatgagttcgcgctcgtcaacatcaccaccggtgcccacaagcaacctgatttcctaggactcaacccattcggccagatcccggttctaaccgatagagacattaccctctgcgaatccagagccatctccaaatacgtagccacaaa

SEQ ID NO: 3390 - DNA, 393 bp, Lilium asiatic
  Clone ID: LIB3230-005-P1-K1-D12
gccacagcaacatattctcgggcaactgatgctcccgccaccatcggcggagcgtgtggcttcagagacccgagcaagccgagggttgccggactgagcactgcgctgttccggaggggggcagcctgtggcgggtgctttgtgatcagatgcgtcgatcacatcctctggtgtctgtctgggagccctccggtggtcgtcaccgccacggacttctgcgctccgaactacgggctacccatagatgatggagggtggtgcaacgacccgaatgagcatttcgagctgtcggagtctgcattcacatctatagctgaaaggggagcagatatggtgcctgttcaatacatgagggtgaagtgtgaggtggatggagggatgagattcactctc

SEQ ID NO: 3391 - DNA, 412 bp, Lilium asiatic
  Clone ID: LIB3230-005-P1-K1-D3
cggacgcgtggggtgacttgcaactctttctctcttataacctcagaggatacagagttattagaggctccacaatccaccaataccactacctatctttcctccaaattaccccatatcttgatagatttctttgaagttaatcctcttatactaagcatagataactgcaattttttcaattctatgcttccctcttctgcattcactcctcttccctatcttcttcctcgaaaattaacacctgtaattgcttatttgcacaaacatgtcaaggcccaaatttctcatcacagtggaaacaaagttccttcctagatctctcttatatctttgcttttgacaatcttcgaaaatctcttcctttataagacccggtgggtttgacactagttgaatttcccgtggagtt

SEQ ID NO: 3392 - DNA, 407 bp, Lilium asiatic
  Clone ID: LIB3230-005-P1-K1-D6
cggacgcgtgggcccaaataaaataaaataaataataataatattaataaaatatccccgactacatcccacgccccccctccctccttgctccggccatcgccttctattgagagtgctacactcctattttgagggccatccgagctgtgatgtatattctctgcttccgcatgagatcgatgatgggtattcctgagctaaaatcactgctttttaaccttcatctggaacccatcctaaggcacagtcttgaacctttgaaggtttgtctgcctactattgtgcgtgagttccatcgccaagccagcgctgcacacttgttcacatcaaagtactccaaggatgaccatatgcttgagtccgaatcctcaaaggcatttgggggacccgagcggttggatatg

SEQ ID NO: 3393 - DNA, 320 bp, Lilium asiatic
  Clone ID: LIB3230-005-P1-K1-D7
gtcacacaaacaccttcttttacgactgtatgtcccggcacgagcgggagaaggggcgctttcacacactaaagcgcgcacttgataaaactattacggacgcggatcgacaccttgcaagcctcctgtaggaaagacattctgccaatcacaaaggatgactagtagattggagatggccaaattacacaaagatgcacaggcagctgaagaagctcacctttctgctgaacctagcttcgccactattcttgcttctccgaggcaatggtgactaaactttgcgaaaaagctggatctgatagaccagggatatttga

SEQ ID NO: 3394 - DNA, 305 bp, Lilium asiatic
  Clone ID: LIB3230-005-P1-K1-D9
agaacacaataagacccaattttatgatctgatgtcggggaaagaatgggaagagtggcgctttcacacacttaaccgtgcacttgataaaactatcaccgccgttgagcgacaccttgcaagcctccgcaaggaaagagcttctgtccaatcacaaatgatgactagtatattggcgattgccaaatcaccgaaaggtgcacaagcagctgaggaagctcatctttctgatgaacgtctcttaaacactattcttgcttctccgaagaaatgaggactaaacattgggaaatagcttgatctga

SEQ ID NO: 3395 - DNA, 411 bp, Lilium asiatic
  Clone ID: LIB3230-005-P1-K1-E1
gcagtctaagaacaaaaagaccgcattggaggagcagatgttggggaaagagtatgaggaatctcgcttagacacactaaattgtgcacttgataaaactattacggaggtggagcgacaccttgcaagcctccgcgaggaaagagattctgtcaattcacaaaggatgactagtagattggagatggccaaattacagaaggatgcacaggcagctgaggaagcttatctttctgctgaacgtcgcttcgccactattcttgcttctccgtggtaatggtgactaaactttgggaaatagctggatctgatagacctgggatagttgagttctgtaaaaggttcagaatggtcacttttgttccatgttagagatttatttttgccctcattttctaaggtaattcggaa

SEQ ID NO: 3396 - DNA, 409 bp, Lilium asiatic
  Clone ID: LIB3230-005-P1-K1-E11
ttgaatgaagttgaaagaaatttacaggatgctatgtctgtagcaaggaatatactgaagaacccaaagcttcttccaggtggcggtgctacagagttgaccgtttccgcaacactaaaacagaagagttcttctattgaaggcattgagaagtggccctatgaagccgctgccttagcttttgaggccataccaagaactctggctcaaaattgtggcgtgaatgtgatccgaacaatgactgcactacaaggaaagcatgcaaatggtgaaaatgcatggactggaattgatggcaacactggtgctatcgctgacatgaaagaacggaagatttgggattcatacagtgttaaggcacagactttcaagacggccattgaggctgcttgtatgctgttgaggattg

SEQ ID NO: 3397 - DNA, 408 bp, Lilium asiatic
  Clone ID: LIB3230-005-P1-K1-E12
ttgaatgaagttgaaagaaatttacatgatgctatgtctgtagcaaggaatatgctgaagaacccaaagcttcttccaggtggcggtgctacagagttgaccgtttccgcaacactaaaacagaagagttcttctattgaaggcattgagaagtggccctatgaagccgctgccttagcttttgaggccataccaagaactctggctcaaaattgtggcgtgaatgtgatccgaacaatgactgcactacaaggaaagcatgcaaatggtgaaaatgcatggactggaattgatggcaacactggtgctatcgctgacatgaaagaacggaagatttgggattcatacagtgttaaggcacagactttcaagacggccattgaggctgcttgtatgctgttgaggatt

SEQ ID NO: 3398 - DNA, 334 bp, Lilium asiatic
  Clone ID: LIB3230-005-P1-K1-E2
gagactcaagaacaaaccgaccgctttttatgtcctataaccgcagaaaaaacgggggaagtacagttttaccctcttaataatacccctgcctaaaactcctccagatgaccccataccccgatagagccccctgaaggaaatcctctcatactaagcacaaataacgccaattctttcaatgctatgctaccctcttatgcattcactgctattacatatacgcttcctctaaaattaacacccgcaaccgcttatctgcacaaacacgtcaaggcccaaattttccatcacagtggaatcaaacttccttaccagatcatccttatatctt

SEQ ID NO: 3399 - DNA, 410 bp, Lilium asiatic
  Clone ID: LIB3230-005-P1-K1-E3
cggacgcgtggggcgacttgcaactctttctctcttataacctcagaagatacaaagtcattagaggctccacaatccaccaataccactacctatctttcctccaaattaccccatatatcgatagatttctttgaagttaatcctcttatactaagcatagataactgcaattttttcaattctatgcttccctcttatgcattcactcctcttccctatcttcttgctcaaaaattaacacctgcaattgcttatttgcacaaacatgtcaaggccctaatttgtcatcacagtggaaacaaagttccttcctagatctctcttatatctttgctttggacaatcttcgaaaatctcttcctttataagacccggcaggtttgacactcgatgaatttcccgtggag

SEQ ID NO: 3400 - DNA, 407 bp, Lilium asiatic
  Clone ID: LIB3230-005-P1-K1-E4
gcggggagattttcagagagatgccagagttgttgtggcttgaggatgaagttctcggtgagtccagtggagtggagagcggaggaatggttcagtctaggaggagttggaatggaccaaaatactctttttgctaccttatgtttgactggtaggtgaggagggagacactattttgtcctgccgacactataagggtagtgtaccaattcttcttccagttcttcgagtacggaggtagcttcttttgtacatttgaatttatcagtatactttggctcatttgctaactggaaaataaatccacttaaatatatttgtcccgtatacctactagaagacaaaaatattaatgagtacggaggtagcttcttttgtacatttgaatttatcatcatactctcttc

SEQ ID NO: 3401 - DNA, 410 bp, Lilium asiatic
  Clone ID: LIB3230-005-P1-K1-E5
ctcgcgccagattctgcagatgtttgcgcaggagatggggcgccttgaggctgatgcgcagagagagattgctctctacgcgctcgctcagattcagtcgcgcgttgtctcgtttgaggagcaggtattgatcatcagagagaagcttgccgaattgtatgaatctgaggagcagtggtcaaaagcagcacagatgttaagtgggattgatctggactcaggaaataggacgatcgatgaagcgtacaagctgtctaaatgtgtccaaattgctcgtctctatcttgaggatgatgatgccattaatgcagaagcttttatcaacaaggcatcatttttagttagcaatagtcaacaagaagtcctgaacttgcaatacaaggtttgttatgcaaggatattagatctga

SEQ ID NO: 3402 - DNA, 356 bp, Lilium asiatic
  Clone ID: LIB3230-005-P1-K1-E6
ctcgcgccagattctgcagatgtttgttcaggttatggggcgccttgaggcttgtgcgcggagagagtttgttctctacgcgctcgctcagattcagtcgcgcgttgtctcgtttgaggagcaggtattgatcatcagagagaagcttgccgaattgtatgaatctgaggagcagtggtcaaaagcagcacagatgttaagtgggattgatctggactcaggaaataggacgatcgatgaagcgtactagctgtctaaatgtgtacaaattgctcgcctctatcttgaggatgatgatgccattaatgcagaagcttctatcaacaaggcatcatgtttagggagcaatattcaac

SEQ ID NO: 3403 - DNA, 401 bp, Lilium asiatic
  Clone ID: LIB3230-005-P1-K1-E7
tccagacgtctaagaacaaaaagaccgcattttaagatctgatgttggggaaagagtgggaggaggggtcgcttatacacactaaattgtgcacttgataaaactattacggaggtggagcgacaccttgcaagcctccgcgaggaaagagattctgtcaattcacaaaggatgactagtagattggagatggccaaattacagaaggatgcacaggcagctgaggaagcttatctttctgctgaacgtcgcttcgccactattcttgcttctccgtggtaatggtgactaaactttgggaaatagctggatctgatagacctgggatagttgagttctgtaaaaagttcagaatggtcacttttgttccatgttagagatttatttttgccctcattttc

SEQ ID NO: 3404 - DNA, 405 bp, Lilium asiatic
  Clone ID: LIB3230-005-P1-K1-E9
ctcagcagctcttcccgaggagcggccgaaagggtggtgatgggcggcagcggcggccgaggaggttcggacagcagcagcggcgaggaggacggcgacgccgactggagggctgcgatcagctccgtctccgccgttggcatcgagtgtcccagcctcaaatggctccgctaaaggccatttccattcccaaccggacgagccccgacacgagcagcagctgtaggccggcaacgctggtctcatgctttaccaaatcaaggcacagaagctcttggatgatctcgtaagcaagagtcttgagattgagagggatcctgtccccatcttgaatgagagcaatcaggtgaatgaaggttgcatccgactattcaggaaagcacctcctggcatgactatacactc

SEQ ID NO: 3405 - DNA, 411 bp, Lilium asiatic
  Clone ID: LIB3230-005-P1-K1-F1
gaaaaaatggtgaggaggaggagggagataaggcggattgaggacaccaacagccgtcaggtgactttctcgaagcgcggcagtgggctgctgaagaaggctttcgagctctccgtgctttgcgatgtcgaggttgcgttgatcgtcttctcacccaagggcaagctctgcgacttctccagctccagtttggagaccgaaactgcgttcttcatatgttttgggggactctatggaggccattttgtttatcgaacaagaggttcgcatgatagattgtcaataatcgaccatcagttttatactattgtatgataatgtattactggttccattgttcttttggaaacttcaagatccaaagattcttagtgttataaatggatcacgccaggggtttgattattatat

SEQ ID NO: 3406 - DNA, 413 bp, Lilium asiatic
  Clone ID: LIB3230-005-P1-K1-F11
gtcatgactgaatctgagcgctatgagtcactacgtcactgcaagtgggttgacgaggttatccctgatgcaccatgggtcatcacacccgagttcattgacaaacacaagattgactttgtggctcacgatgcactaccttatgcagatgcaagtggggcaggaaacgacgtttatgagtttgttaaagcaattggaaaattcaaggaaacaacgcgcacaaatggtgtatctacctcagatgttataatgaggattctgaaggattacaatgagtatgtcatgcgtaatttagcgcgtggatattcacggaaggaccttggtgtgagctatgttaaggagaagcaattgagagtgaacatggggatatccaaactgcgtgaaaaagtgaaggagcatcaagaaaagttaca

SEQ ID NO: 3407 - DNA, 415 bp, Lilium asiatic
  Clone ID: LIB3230-005-P1-K1-F12
gtcatgactgaatctgaacgctatgagtcactacttcactgcaagtgggttgacgaggttatccctgatgcaccatgggtcatcacacccgagttcattgacaaacacacgattgactttgtggctcacgatgcactaccttatgcagatacaagtgccgcagagaaacgacgtttatgattttgttaaagcaattggaaaattcaatgaaacaacgcgcacaaatggtgtatctacctcaaatgttataatgaggattctgaaagattacaatgagtctgtcattcgtaatttagcgcagagatattcactgaatgaccttgatgtgagctatgttaaggatacacacttgagagtgaacatgctgatatccaaactgcgtgaaaaagtgtaagagcatcaagaaaagttacac

SEQ ID NO: 3408 - DNA, 404 bp, Lilium asiatic
  Clone ID: LIB3230-005-P1-K1-F3
cgagatgccgcttgacggccctcccgccgagcccaagaagaagaagcggatgaccaaattgaagcgccccatcttgtcacccaactcagacggcgatcgccaagggtctttaaacatcaagccgcaggtccagacaggatatggtacctgtgcggggtaccgtccaatttttagacgaagtgtgaacccaggatgtggtaactgtgtgtggtgccgtccatttttaagacgaagtgagaacctctttgatgtgagtccaggacccaggttatcagattggtccattccgatgcccctgggtgaatttccggtgctgaagttgcctcaacatgacaatagtgatcaatcaatcgcttacagtcatgctggaacgtctgaaccacctcccaaagatggggaggaca

SEQ ID NO: 3409 - DNA, 415 bp, Lilium asiatic
  Clone ID: LIB3230-005-P1-K1-F4
tccgtttctccattattggacctccatctcaatctcaacgagtgcaagatctgatcggcgatgtcggtggatcgggtgatcggtgtggcgctggacttctcgccgagcagcaaggcggcgctccggtgggcgctggagaacatcgtgcgggatggggatcatctcatcctcatccacgtgcacaaggatgctttctacgaggagggcgagatgcagctctgggagaccactggatctccacttatccctctggcggagttttctgaccccgtaattgaaaagaagtatggagtgaagactgatgtcgaaaccttggatttactcaacacagctgcaaggcagaaagctattgtggttgtcatgaacgtgtattggggagatccccgcgaaaagttatgtgaagccattgataaca

SEQ ID NO: 3410 - DNA, 414 bp, Lilium asiatic
  Clone ID: LIB3230-005-P1-K1-F5
tcccgttctccattattggacctccatctcaatctcatctagtgcaagatctgatcggggatgtgggtggatcttttgatctttgtgccccttgacttctcgccgagcagcaaggcggcgctccagagggcgctggagaacatcgtgcgggatggggatcatctcatcctcatccacgtccacacggatgctttctacaaggagggcgagattcatctctgggagaccactggatctccacttatccctctggcggagtcttctgaccccgaaattgcaaagaagtatggagtgaagactgatgccaaaaccttggattcactcaacacagatgcaaggcagaaagctattgaggttgtcatgaatgtgcataggggagatccccccggaaagttatgagaaaccattgataac

SEQ ID NO: 3411 - DNA, 415 bp, Lilium asiatic
  unsure (1)..(415): unsure at all n locations
  Clone ID: LIB3230-005-P1-K1-F6
ctcacgccagattctgcatatgtttgctcaggttatggggcgccttgaggctggggcgcagagagagattgttctctacgcgctcgctcanattcagccgcgcgttgactcgtttgaggagcaggtattgatcatcacagagaagcttgccgaattgtatgaatctgaggagcagaggtcaaaagcagcacagatgtgaagtgggattgatctggactcacgaaataggacgatcgatgaagcgtacaagctgtctaaatgtgtccaaattgctcgtctctatcttgaggatgatgatgccattaatgcagaatcttttatcaacaaggcatcatttttagttagcaatagtcatcacgaagtcctgaacttgcaatacaaggtttggtatgcaagggatttatatctgaagagg

SEQ ID NO: 3412 - DNA, 230 bp, Lilium asiatic
  Clone ID: LIB3230-005-P1-K1-F7
gaaaaaatggtgaggacgagcagcttttaaggcttattgacgacaccaacaggcggcaagtgactttttcaaatctcttcaataccccgccgaaaaaggcttccaaactctcccagctctccaatgacaaggttgcattaaccgccttctcacccaacaccaagctctgcgacttctccaactccattctggaaaccgaaactgcctcctccatttgttttggggaaccc

SEQ ID NO: 3413 - DNA, 407 bp, Lilium asiatic
  Clone ID: LIB3230-005-P1-K1-F8
cggacgcgtggggtgacttgcaactatttctatcttataacctcacaggacacagaggtatggagaggctccacattccaccaataccactacctatctttcctccaaattaccccatatcttgatagatttctttgaagttaatcctcttatactaagcatagataactgcaattttttcaattctatgcttccctcttctgcattcactcctcttccctatcttcttcctcgaaaattaacacctgtaattgcttatttgcacaaacatgtcaaggcccaaatttctcatcacagtggaaacaaagttccttcctagatctctcttatatctttgcttttgacaatcttcgaaaatctcttcctttataagacccggtgggtttgacactagttgaatttcccgt

SEQ ID NO: 3414 - DNA, 403 bp, Lilium asiatic
  Clone ID: LIB3230-005-P1-K1-F9
gaaaaaatggtgaggaggaggagggtgataaggcggattgaggacaccaacagccgtcaggtgactttctcgaagcgcggcagtgggctgctgaagaaggctttcgagctctccgtgctttgcgatgtcgaggttgcgttgatcgtcttctcacccaagggcaagctctgcgacttctccagctccagtttggagaccgaaactgcgttcttcatatgttttgggggactctatggaggccattttgtttatcgtacaagaggttcgcatgatagattgtcaataatcgaccatcagttttatactattgtatgataatgtattactggttccattgctcttttggaaacttcaagatccaaagattcttagtgttataaatggatcatgccaggggtttgat

SEQ ID NO: 3415 - DNA, 341 bp, Lilium asiatic
  Clone ID: LIB3230-005-P1-K1-G1
gcgacccacacatccggtcatgactgaatattatttttatcttttactacacacctacaagggggaagaggcggttttccatctttcacaatgcctcatcaaacaacgatttcaagctcataacacacttatcgactttgaggctgacgatgcactaccttaaacatatgcaaatgctgccagaaactacagctatgattctagaacagcaactggaatattcatataatcaacgcgcactaatagagaaccatacctcatatgctaaaaagaggatcctaaaatattacaaagataatctcacgccataattaccccttggatattcacataatgacctt

SEQ ID NO: 3416 - DNA, 417 bp, Lilium asiatic
  Clone ID: LIB3230-005-P1-K1-G11
gtcatgactgaatctgagcgctatgagtcactacgtcactgcaagtgggttgacgaggttatccctgatgcaccatgggtcatcacacccgagttcattgacaaacacaagattgactttgtggctcacgatgcactaccttatgcagatgcaagtggggcaggaaacgacgtttatgagtttgttaaagcaattggaaaattcaaggaaacaacgcgcacaaatggtgtatctacctcagatgttataatgaggattctgaaggattacaatgagtatgtcatgcgtaatttagcgcgtggatattcacggaaggaccttggtgtgagctatgttaaggagaagcaattgagagtgaacatggggatatccaaactgcgtgaaaaagtgaaggagcatcaagaaaagttacacacg

SEQ ID NO: 3417 - DNA, 384 bp, Lilium asiatic
  unsure (1)..(384): unsure at all n locations
  Clone ID: LIB3230-005-P1-K1-G12
tacctnactgccagggggggggggaggttattcctgatgcaccatgggtcatcacacccgagttcattgacaaacacaagattgactttgtggctcacgatgcactaccttatgcagatgcaagcggggcaggacacgacgtttatgagtctgttgaagcaattggaaaattcaaggaaacatcgcgcacaaatggcgtatctacctcagatgctataatgaggattctgaaagattacaatgagtatgtcatgcgtaatttagcgcgtggatattcacggaaggaccttggtgtgagctatgttaaggagaagcaattgagagtgaacatggggatatccaaactgcgtgaaaaagtgaaggagcatcaagaaaagttacaca

SEQ ID NO: 3418 - DNA, 138 bp, Lilium asiatic
  Clone ID: LIB3230-005-P1-K1-G2
caaccgactgaaaaaacaaacacaggaatgacatcatcgccaaccaagcactaccccatgcagaaccaaccgctaaaagaaacgaccgtgatgactccgaaaaagaaaccggtaaccccaaagaaaaaactcacacaa

SEQ ID NO: 3419 - DNA, 401 bp, Lilium asiatic
  Clone ID: LIB3230-005-P1-K1-G4
cccaatcccattttgctctcaaatctctgatggcgcccaagtctgagaaaaagcccgcagagaagaagccggtggcggagaagcccgccgccgaggaggagaagaaagcggccccagccgagaagaagccggcggtgaagaagcccaaggctgggaagaagctcccggcctccaaggaaggggagaagaagaagaagaggtcgaagaagtcggtggagagctacaagatatacatcttcaaggtattgaagcaggtccaccccgacattggaatctccagcaaggccatggggataatgaacagcttcatcaacgatctcttcgagaagatggctcaagagtctgctcgtctcgcccgctacaacaagaagaataccatcacctcccgggagattcagacc

SEQ ID NO: 3420 - DNA, 389 bp, Lilium asiatic
  Clone ID: LIB3230-005-P1-K1-G5
accacgcgtccacgcaatcccatttttctctcaaatctttgaaggttcccaaccccgagaaaagggggccgagtaagaattctatgtttttgaagcccgccaccaaggaggagaagaaagcggccccagccgagaagaagccggcggtgaagaagcccaaggctgggaagaagctcccggcctccaaggaaggggagaagatgaagattattttcaagaattcggcggagagctacaacatatacatctccaaagcattgaagcaggtccaccccgacataagaatctccagcaaggccatggggataatgaacagcttcatcaacaatctcttagagaagatggctcatgagtttgctcgaatcgcccgctacaacaagaagaatacc

SEQ ID NO: 3421 - DNA, 414 bp, Lilium asiatic
  Clone ID: LIB3230-005-P1-K1-G6
atgactgaatcttatctctatgattcactacgtcactgcaagtgggttgacgaggttatccctgtttcaccatgggtcatcacacccgagttcattgacaaacacaagattgactttgtggctcacgatgcactaccttatgcagatgcaagtggggcaggaaacgacgtttatgagtttgttaaagcaattggaaaattcaaggaaacaacgcgcacaaatggtgtatctacctcagatgttataatgaggattctgaaggattacaatgagtatgtcatgcgtaatttagcgcgtggatattcacggaaggaccttggtgtgagctatgttaaggagaagcaattgagagtgaacatggggatatccaaactgcgtgaaaaagtgaaggagcatcaagaaaagttacacacg

SEQ ID NO: 3422 - DNA, 421 bp, Lilium asiatic
  Clone ID: LIB3230-005-P1-K1-H11
gtcatgactgaatctgagcgctatgagtcactacgtcactgcaagtgggttgacgaggttatccctgatgcaccatgggtcatcacacccgagttcattgacaaacacaagattgactttgtggctcacgatgcactaccttatgcagatgcaagtggggcaggaaacgacgtttatgagtttgttaaagcaattggaaaattcaaggaaacaacgcgcacaaatggtgtatctacctcagatgttataatgaggattctgaaggattacaatgagtatgtcatgcgtaatttagcgcgtggatattcacggaaggaccttggtgtgagctatgttaaggagaagcaattgagagtgaacatggggatatccaaactgcgtgaaaaagtgaaggagcatcaagaaaagttacacacggtag

SEQ ID NO: 3423 - DNA, 115 bp, Lilium asiatic
  Clone ID: LIB3230-005-P1-K1-H12
acccactcttggaaggacgcgtggactcaaatatgtccaaaggcttgctagtcgccattctgtgtgtgcggatactgggccttgcgaggttgggattcttttgaattcgatgaaa

SEQ ID NO: 3424 - DNA, 158 bp, Lilium asiatic
  Clone ID: LIB3230-005-P1-K1-H2
cgcacaccagactccaaataaaattttttaaatcatacgacgacccaaaaatgaggcccgtgtgcatgtttattcctctaccgaactccttgatacgcacatccccacaattacaaaggctacactccgatcatcatacaccatccagcctgacaaat

SEQ ID NO: 3425 - DNA, 415 bp, Lilium asiatic
  Clone ID: LIB3230-005-P1-K1-H4
gtcatgactgaatctgaacgctatgagtcactacgtcactgcaagtgggttgacgaggttatccctgatgcaccatgggtcatcacacccgagttcattgacaaacacaagattgactttgtggctcacgatgcactaccttatgcagatgcaagcggggcaggaaacgacgtttatgagtccgttaaagcaattggaaaattcaaggaaacatcgcgcacaaatggcgtatctacctcagatgttataatgaggattctgaaagattacaatgagtatgtcatgcgtaatttagcgcgtggatattcacggaatgaccttggtgtgagctatgttaaggagaagcaattgagagtgaacatggggatatccaaactgcgtgaaaaagtgaaggagcatcaagaaaagttacaca

SEQ ID NO: 3426 - DNA, 385 bp, Lilium asiatic
  Clone ID: LIB3230-005-P1-K1-H5
tgccgcttgacgatcctccctgtaagcccaagaagaagaaggggatgtgcaaatttacccgccccatcttgcaacccaactcacaccacgatcgccaagggtctttacacatcaagccgaaggtccagacaggatatggcacctgagcggggcaccagacaacttttagactaactgtgaacccatgacgaggtaactgcgctgaagaccggccatttttaagaccaagacagaacctcgtcgatgtgagtacaggacccatggtataaaatgcgtgcatgccaatgcccgcgacagtatttccagtgctgacattgactaaccatgacaatagtgatcattcaatcggttacagcaatgcttgaacacgggcaccacctctgat

SEQ ID NO: 3427 - DNA, 431 bp, Lilium asiatic
  Clone ID: LIB3230-005-P1-K1-H6
cactcgtccgctctaggaaggcaatttgaatttcacacaaatggcttctggacaagaagcagaagtagctgctagtgaaaatgtacttgaatggccacaaaaggacaagagaagattcctacatgctgtttatcgtgtcggggatctagaccgtactattaaattttacaccgaagctttggggatgactctgttgaggaagagagacgttccagaagagaaatactcaaatgctttccttggatatgggccagaagaatctcattttgtggtagaattgacatacaactatggagtggacaaatatgatataggtaccggctttggtcattttgcaattgcttctgaagatgtatataaactggccgaggtcattaaggccaagggcggtaagattacccgggagcctggtcctgtcaaaggtgggacga

SEQ ID NO: 3428 - DNA, 345 bp, Lilium asiatic
  unsure (1)..(345): unsure at all n locations
  Clone ID: LIB3230-005-P1-K1-H7
ggacccacgcgtncggggacgcgtgggctctaatttttccattggcttgctagtcgccatgcgtggtgggcgaattctgtgcctgacgagcttgcaattcttttgaatcccatgaaaagattgctgcgatgtgcttcatgcccaagatagaaacacatttcaaatcctgtggctcttgtatacctgatgctgatggtaccttgtcaggtgagaggctgagcgtggttactcgttctctgagagcaaattccaagacttatctgtaaaccgtggcagagatgctctgatagtatactgctgcacagggctccacaaagcctgtagttgataatttaagatatgaat

SEQ ID NO: 3429 - DNA, 228 bp, Lilium asiatic
  Clone ID: LIB3230-005-P1-K1-H9
cgaaatagccgcttgacggccctcccgttgtatcccaagaagaagaaggggatggcgaaatttttacaccccatcttgccacccaactcacaccgcgatcgccaagggtctttacacatcaagccgcaagtccagacaggatatggtacctgtgctgtgcaccgtccaatttttagacgaagtgtgaacccaggatgtggtaactagtgttggagccgttcattaata

SEQ ID NO: 3430 - DNA, 395 bp, Lilium asiatic
  Clone ID: LIB3230-006-P1-K1-A10
atgatatagccggtcttgttcgaggggcccatcaagggcagggcctggggaacagcttcttgtcacacattcgagctgttgatggaattttccatgtgttaagtaagtttttagttgggttttcattttctattacaacaataaacttttgccacttatgtgcatgaagggagatgtgaggagagattttagaatgaaatgtgtggttggtttttcattgtccactagagggttatttataggagaacaagagatattcacacacacaccactacattcacaccaacgcaatttcctcaaggctatgccacaactatactattgctacttttacacctaaagttgtacatatactttaacatgttctcacaaactcaaggttggtcaaacaacat

SEQ ID NO: 3431 - DNA, 376 bp, Lilium asiatic
  Clone ID: LIB3230-006-P1-K1-A12
gtttgagaatgagctggacttgctaggaagaatccggcacccaaatataaattctgtattgggttattgtattcatggggagacgaggtttattatatatgaattgatgcctcatgggtgtctggaaacacaattgcacggaccatctcatgggtcagctctaacttggcgcattctaatgaaaatcgcacttgatgcagcaagaggactagagtatcttcatgagcactgtaacccacctgtgattcatagagatttaaaatcttctaatattcttctcgattcggagttcaatgctaagatttcagatttcggacttgcaatgaccggtggaaaccatcacaaaagtggtatcaagctttttggtactctgggc

SEQ ID NO: 3432 - DNA, 405 bp, Lilium asiatic
  Clone ID: LIB3230-006-P1-K1-A2
gattcttgactccgatatttatcttctccatctagaggaacgtaagatcgctgaggcaggcccttccaattggcagaaagcttgttatgtgccaactaagtcagatgcgatggttgttgccttccgaaaatggataagaaagtatgcacaatctcaggtggattggggaactaaaagtcatcatctccctccaactcctcctaaagaacagcttatggacagatactggtcccatgtagtgaactgcattagctgccggagggctttgcaaggtctgaaagccctgcaggttgctctgcaggttgcatcgatagccgcaatcggaattctcgcagctgccagacagagtttggtgtcagtagcagcaaggactgcgatcgtgtccgctgccttgctctgcttcct

SEQ ID NO: 3433 - DNA, 327 bp, Lilium asiatic
  Clone ID: LIB3230-006-P1-K1-A3
gattcttgactcccatattaatattattcatttaaagcaacgagagacccaccaggcgggggcggtcaatttgtttaaacacttctacatgccaactaagtcatatgcgatggttcttgtcttcctgaaattgataaaaaagcctgcacaatcttatgtgcattgcgttactataagtcaaatttacgttcaactcctccttaagaacagcttatttacacatactggtcccatgtagtgaacttgattaccttccggaaggctttgcaatggtctgaaagccctacaccttgctctgcaaatttcatccatagccaaaatcctaat

SEQ ID NO: 3434 - DNA, 357 bp, Lilium asiatic
  Clone ID: LIB3230-006-P1-K1-A5
attgatcacaagccatcctcatagccagtagtctaaccaaattgacagaagggtgcgagagtcacaagcaagtgaagcaagactaggacatgacaagattgatatattattacgagctaaattgatcacaagtaagccccaacgccagatgtcataaagcagccaggttgaattgggagagacatcacatgaatagcttgtgaaggtggcattattgaaacaacctcgcaagactcaaagtcagcctgtgttaatgaaagcacatagctcttcagcacacgcgaataaagtcatcatagcaaattctcattcaaatgaatatttattgtatgtggtattttcaaaaacacccttaca

SEQ ID NO: 3435 - DNA, 395 bp, Lilium asiatic
  Clone ID: LIB3230-006-P1-K1-A6
gtcagtcaaagcatatgtggctatcaacttatctctgggcgatcgtcctcttgctgcgcagttccaagaaattcctctggatacacgcatgattgaggccgaacgagttggatatgaaattttagaaaagactgtagtggacaaactcccgaatgatctggaaggaatggaggcttcaatgaagagactgctggctttgattgatgatgtctataaatatgtggatgatgttgttgaaggacgtttgcccccagacaataatattgggagagtcatagctgatactttggcatcagttccgaaaatacctcctcctgtttttgataagctcttcaatgaccggattcaggacaaacttgcattggtctacttgtcaagtctcactcggacgcagc

SEQ ID NO: 3436 - DNA, 328 bp, Lilium asiatic
  Clone ID: LIB3230-006-P1-K1-A8
ggattcccattacccatatccatatcattgcaccacaattagaatgagcggggggaagaacacattagatattttttctaaaactaccaactctgcgaaagactctaacgctctcatgaagcatatggtctacaatgagatccccaccctagcttccaactctatccaaacattccacaagttcatacaacccctcaagacccaaatcagacaaaaacacaaccccatctactgtgacatttactacattgccattgtccactttctgcaatattattaacaaataattttttttagagttatccatcatcttcaaaaatatttttta

SEQ ID NO: 3437 - DNA, 371 bp, Lilium asiatic
  Clone ID: LIB3230-006-P1-K1-A9
gaggccgcaagggcagtggctcaagggcgaaatcggtgactcgctcagtcaaggcggggctccagttccccgtcggaaggatcggccgctacctcaagaagggccgctacgctcagcgcgtcggatctggagctccggtctacctcgctgccgtgctggagtatctcgctgccgaggttttggaattagctggaaatgcggcccgggacaacaagaagaaccggattgttcctcgacatgtgtgtctggcggtgaggaatgatgaggagcttgggaggttgttgggtggggttactattgctcatggtggagttttacccagcatcaaccctgtcctgctgccgaagaagactgggaaggagggggtggag

SEQ ID NO: 3438 - DNA, 203 bp, Lilium asiatic
  unsure (1)..(203): unsure at all n locations
  Clone ID: LIB3230-006-P1-K1-B1
ccgggntcgacccacgcccgtccgtanctcgctcagaaaccgatggagtccctggcaacttcgtctcccgtcgggacccaatcgcctacagtgtgacggctggagaggatctaacactcgacgcttncaaccacgggaacctactgagcggctttacgccggcgacactnnctggagcgttcgggcctgagccaaatccttga

SEQ ID NO: 3439 - DNA, 387 bp, Lilium asiatic
  Clone ID: LIB3230-006-P1-K1-B10
cgattcccattcccgagatccagatcactgcagcacagtgagaatgagcggggtgaagaaggcggtggagacggtggctaaggctacgaagtcggcgatcgactgggacgggatggggaagctcatggtctccgatgaggcccgcagggagttcgccaacctccgccgcgctttcaacgaggtcaaccagcagctccagaccaaattcagccaggaacccgagcccatcgactgggagtattacaggaaggggattgggcctcgtttggttgatatgtacaaagaagctttcgagagtatacagatcccgaaatatgttgacactgtgacccctgagtacaagcccaaaattcgatgctctgttggtggaactgaaagaagccgagc

SEQ ID NO: 3440 - DNA, 394 bp, Lilium asiatic
  Clone ID: LIB3230-006-P1-K1-B11
ggagctggtcgcattggcaagcttttactccagcgcctaaagcccttcaactgcaaccttctctatcatgatcggcttaagatggatcccgaactggagtcagctataggggcaaagtttgaggaagatcttgatgctatgcttcccaagtgtgacataattgtcatcaatacaccccttactgagaaaacaagggggttgtttgacaaaaataggattgcaaaattgaagaaaggagttctcattgtgaacaatgcgcgtggagcgataatggacactcaagcagttgcagatgcttgctctactgggcatattgggggttacagcggggatgtgtggtaccctcaaccagctccaaaggatcattcatggcgctacatgcctaacctggcca

SEQ ID NO: 3441 - DNA, 395 bp, Lilium asiatic
  Clone ID: LIB3230-006-P1-K1-B12
catgaacgcccctcctcgctacgagcgattcgtcgtccccgaaggcgtcaagaaagtttcgcatgagagggacaccaagatcgtcaacgccgccgccttcaccatcgagagggaagaccacacaatcggaaatcttgtccgcatggagctgcatagagatcccactgtgcttttcgccggctacaagctcccacaccccctgctctacaaggtcatacttaggatccagacgaccagccagtcctcgccgacacaggcgtacactctggccattgaggacctcgacaaagagctgctgcatctcaagaggacatttgaggatgcaaaaaacaagtatgaagacaagatgagacagggttactaggctgcctgcattgcagcgaaataaagtattc

SEQ ID NO: 3442 - DNA, 405 bp, Lilium asiatic
  Clone ID: LIB3230-006-P1-K1-B2
gtcggcgccgaagagcgattccagatctggtttctttggtgcacggatttctttttgttgaacgacaatggaagatgatgccaacgctggaaagaaggaagaggaggagttcgccaaggggcccctctccgttctgatgctcagtgtgaaaaataatacccaggttctcattaactgcaggaacaacaagaagctacttggtcgtgtcagggcattcgaccgccactgcaacatggtccttgagaatgtcagggaaatgtggactgaggttccgaagacgggtaaggggaaaaagaaagctctcccagtcaataaggatcggttcatcagcaagatgtttcttcgtggagactctgttatcatcgtccttcgaaaccccaagtgaagaggatcttcgtcgtcgct

SEQ ID NO: 3443 - DNA, 403 bp, Lilium asiatic
  unsure (1)..(403): unsure at all n locations
  Clone ID: LIB3230-006-P1-K1-B3
gtcggcgcctaacagcgattggagatctgttttctttggtgcacggatttatctgggttgtacgacaatggaatatgatgccaactctggaaagaaggaataggaggagttcgccaaggtgcccctgtcacgttctgatgctcagagtgaaaaataatacccatgttttgattaactgcacgaacaacaagaagctacttggttgtgtgaaggcattatatcgccagtgcaacatggtccttgaaaatgtcagggaaatgtggactgaagttcccaagacaggtgaggggataaagaaagctcatctagtcaataaagatcggttcatcagcaagatgtttcttcgtggagactatggtatcatanggctttgaaacccgaagtgaagaggatctttttcatt

SEQ ID NO: 3444 - DNA, 174 bp, Lilium asiatic
  Clone ID: LIB3230-006-P1-K1-B4
cccacgcgtccggaatttttaggtttggtgatgaatagtacaggttggacgaaggatttggatcattagatccttctcccctccactgatatatgtgtcgctttgttgagttgtacgtgtcatcgtgaatggtctataaaggtctccgaattatcgatgagatggtttgccact

SEQ ID NO: 3445 - DNA, 400 bp, Lilium asiatic
  Clone ID: LIB3230-006-P1-K1-B5
attgatcacaagccatcctcagagccagaagtcaaaccaaattgacagaagggtgccaaagccacaagcaagtgaagcaagactaggtcatggcaagattgatagattagcacgagctaaattgatcacaagtaatcctcagtgccagatgtcagaaagcagccaggttgaattgggagagacatcacatgaagagctagtgaaggtggcatcatcgaagcaacctcgcaagactcaaagtcagccggtatcaaggaatgcacatagctcttcagcacacggaaataaagtcatcatagcaaattctcattcaaatgaagatctagtgaaggtggcatcatcaaagcaccctcacaagactcaacgtataatggtaccatggaatgcaaattgctcttca

SEQ ID NO: 3446 - DNA, 393 bp, Lilium asiatic
  Clone ID: LIB3230-006-P1-K1-B6
attgatcacaagccattctcagagccagaagttaaaccaaattgacagaagggtgcgcaaagccacaagcaagtgaagcaagactaggtcatggcaagattgatagattagcacgagctaaattgatcacaagtaatcctcagtgccagatgtcagaaagcagccaggttgaattgggagagacatcacatgaagagctagtgaaggtggcatcatcgaagcaacctcgcaagactcaaagtcagccggtatcaaggaatgcacatagctcttcagcacacggaaataaagtcatcatagcaaattctcattcaaatgaagatctagtgaaggtggcatcatcaaagcaccctcacaagactcaacgtataatggtaccatggaatgcaaatt

SEQ ID NO: 3447 - DNA, 66 bp, Lilium asiatic
  unsure (1)..(66): unsure at all n locations
  Clone ID: LIB3230-006-P1-K1-B7
ggcggcgcggncaccaggggcgccaatgggcacgaagaagggctagagggggggggggaccgcgga

SEQ ID NO: 3448 - DNA, 263 bp, Lilium asiatic
  Clone ID: LIB3230-006-P1-K1-B8
ggcctttaaaaagacatcccattttttttagtcacccccgaccttggtgggggggccggacacattatatgtccctccacacaaaccaaccaaggtgaaggccactaaggctcacaaggaaaagaaggccgtgaccaaaaagccgaccctacataccacctatttctagatgatccgacaggcgatagactacctcaaggagcgaaccggatcaagccagtacgcaatctcaaaggattgtgaagacaagcacaaggctcata

SEQ ID NO: 3449 - DNA, 400 bp, Lilium asiatic
  Clone ID: LIB3230-006-P1-K1-B9
ctacttggggatgacatgagagccaaggtggccgattttggactagttcggcttgctccggatgggaaagggtgttccattgagacaaggcttgcagggacattcggatatctcgctcccgagtatgcagtgaccgggcgtgtgacgacaaaggccgatgtcttcagcttcggggtaatactgatggaactaatcaccggtcgcaaggcacttgacgagagccaaccggaggagagcatgcacctcgtcacctggttccgaagaatgcaactcaacaaggacggcttccagaaggccatcgaccccactatcaaccttgatgacgaggagacgctcaccagcatcagcactgtcgccgagctggctggacactgctgcgcgagggagccataccagagac

SEQ ID NO: 3450 - DNA, 180 bp, Lilium asiatic
  Clone ID: LIB3230-006-P1-K1-C1
caacctcattacaccaatgctctccattattttcatgccaacaaccgcaaacctgagcggtgagatgccttaattcaagactctcaaatccaacaaatggagctgccagcccaaaccaatatggccgaaacccttcatcatgccaaactagcacttcacacatcacatgatgtactctca

SEQ ID NO: 3451 - DNA, 394 bp, Lilium asiatic
  Clone ID: LIB3230-006-P1-K1-C10
ggccgctgtagagtcagccccctttgtttagtctccgcctaccttggtcgagggggcagtcacatcatatgtccctccggtgaaaccggccaaggtgaaggccacgaatgctcccaaggaaaagaaggccgtgacgaataagccggccctacatcctacctatctcgagatgatccgcgaggcgatagcctccctcaaggagcgaaccgggtcaagccagtacgcgatctcaaagtttgttgaatacaagcacaaggctcatctcccggcaaactttaagaagatcctcctcgttcagctgcggaaactcaccgatgccggctaactcaccaaggtcaagaactcttacaagatcgctgcaaagcctgtttcttttgtgaaaaagacatttgtc

SEQ ID NO: 3452 - DNA, 380 bp, Lilium asiatic
  unsure (1)..(380): unsure at all n locations
  Clone ID: LIB3230-006-P1-K1-C11
cgnntccggtttttnngtggcattnnnatgatggctcagtatcgagnngtcctaaggaagaagggtcatgtcctaccctcggagatcatcaacgagagtgtgatntgagtcnnagtggattccctaaancccttttatgcatgcctcgaggnggtttcgttcatggttgataattgttccacgactgcccgtttgggttcgaggaagtgggcaccgcgtttcgattacattcttacccagcaggcgtttgtggctgtggacaataatgctgcaatcaatgaagaccttcggagcagtttcttggttgatccgattcatggtgccatccaagtatgtgcgcagctgaggcctactgtggacatatcaatgcctgctgatgc

SEQ ID NO: 3453 - DNA, 394 bp, Lilium asiatic
  Clone ID: LIB3230-006-P1-K1-C12
cagaaccaggtgtctgcgagcttcgaatggtcactccccacgccgactcgtattttgagaatgagtggtacactgactggactggatcattcgtatcaggtcgtccctcacaccacaaccatttttttccattaacgcgtattagctattatttttgcattgttctcaacttataaatgataaccattaacacaaattagttattacttttgaatccttctaaatctaagttatttcataaatcatcgtataattttctttaaaataaccgtgggactttaaaaaaacaaaaaactatgtttttatttttgttattaaaaacaattatttttggccagtaagatcatgctgagagttatacttccatttcatatgttatgtgacaacacaattt

SEQ ID NO: 3454 - DNA, 406 bp, Lilium asiatic
  Clone ID: LIB3230-006-P1-K1-C2
aaagaagatagggaagttacttgattcaaatgggttggatatgtcaaaggcatttatgcttgatacacaagatcaagctgaggcgaagtataagaaatgggagaaggagcctgctccatctgggtgggatgttttcaatcagaaaacactgtatgatgcatacaaaaagcgtacaaagaacatagtgtgtgatatggaggcatacaataaagcgaaagaagctgatccagagttttatcgtgatgctgctagtcttcagtatgggaaggtaacaaagactcctgacgagaacattgataggatggtgaaggagcttgaagagacgaagaaaaagcgcgaggcattcagcaggaggcgcaagttccacgaagagaaggatgttgactcgattaacgacaggaatgag

SEQ ID NO: 3455 - DNA, 341 bp, Lilium asiatic
  Clone ID: LIB3230-006-P1-K1-C3
gttggccgctacctcaaaaagggccgctatgcaaagcgtgtaggctccggagctccagtctaccttgccgccgtgctcgagtaccttgctgctgaggtgctggagctggcaggcaatgctgccaaggacaacaagaagtctcggatcatcccgaggcacgtctgccttgctgtcaggaacgaccaggagctgggcaagctgctcgctggagtcaccatctcccatggcggtgtcatccccaacatcaacccggtcctgctccccaagaagactcttgagaagggtgattctgctgcaacaaaatctcccaagaagactcccaagtctcccaagaaagccac

SEQ ID NO: 3456 - DNA, 401 bp, Lilium asiatic
  Clone ID: LIB3230-006-P1-K1-C4
gccgcatattccccgtccgaagatgaatgtctgcatgctcggagatgctcagcatgtggaggaggctgagaagattgcgctggactacatggatgttgaagggttgaagaagatgaataagaacaagaagctggtcaagaagcttgcaaagaagtatcatgctttccttgcatctgaggccatcatcaagcagattccacgtcttcttggcccgagtcttaacaaggcagggaagttccctacactggtgactcatcaagaatctcttgagtcaaaggtgaatgagaccaaagcaatggttaagctccagctgaagaaagttctttgcatgggtgttgcagtaaggaatcttggaatggaagacaagcagatctttcagaacgtgcagctcagtgtcaatt

SEQ ID NO: 3457 - DNA, 389 bp, Lilium asiatic
  Clone ID: LIB3230-006-P1-K1-C5
gccgcatattccccgtccgaagatgaatgtctttatgctcggagatgctcagcatgtgggggaggctgataagattgggctggactacatggatgttgaagggttgaagaagatgaataagaacaagaagctggtcaagaagcttgcaaagaagtatcatgctttccttgcatctgaggccatcatcaagcagattccacgtcttcttggcccgggtcttaacaaggcagggaagttccctacactggtgactcatcaagaatctcttgagtcaaaggtgaatgagaccaaagcaatggttaagttccagctgaagaaagttctttgcatgggtgttgcagtagggaatcttggaatggaagacaagcagatcttttaaaacgtgcagc

SEQ ID NO: 3458 - DNA, 398 bp, Lilium asiatic
  Clone ID: LIB3230-006-P1-K1-C7
attgatcacaagccattctcagatccattatgtcaaaccaaattgacagaggggtggcaaagccacaagcaagtgaagcaagactaggtcatggcaagattgatagattagcacgagctaaattgatcacaagtaatcctcagtgccagatgtcagaaagcagccaggttgaattgtgagagacatcacatgaagagctagtgaaggtggcatcatcgaagcaacctcgcaagactcaaagtcagcctgtatcaaggaatgcacatagctcttcagcacacggaaataaagtcatcatagcaaattctcattcaaatgaagatctagtgaaagtggcattatcaaagcaccctcacaagactcaacgtataatggtaccatggaatgcaaattgctct

SEQ ID NO: 3459 - DNA, 392 bp, Lilium asiatic
  Clone ID: LIB3230-006-P1-K1-C8
ggcccctgtagactcacccccctttttttagactacgcccaccttgaccgagggggcagacacatcatatttccctcccgtgaaccccgccaaggggaaagccacgaaggctcccaaggaaaacaaggccgtgaccaagaagccggccctacatcctacctatctcgagatgatccacgaggcgatagcctccctcaaggagcgaaccgggtcaagccagtacgcgatctcaaagtttgttgaacacaagcacaaggctcatctccccgcaaactttaagaagatcctcctcgttcagctgccgaaactcaccgctgccggcaaactcaccaaggtcaataactcttacaagatcgctgcaaagcctgttgcttctgtgaaaaagacatctg

SEQ ID NO: 3460 - DNA, 400 bp, Lilium asiatic
  Clone ID: LIB3230-006-P1-K1-C9
ggccgctgtagagtcagcccccgctgtagagtctccgcctaccttggtcgaggggccagtcacatcagatgtccctccggtgaagccggccaaggtgaaggccacgaaggctcccaaggaaaagaaggccgtgacgaagaagccggccctacatcctacctatctcgagatgatccgcgaggcgatagcctccctcaaggagcgaaccgggtcaagccagtacgcgatctcaaagtttgttgaagacaagcacaaggctcatctcccggcaaactttaagaagatcctcctcgttcagctgcggaaactcaccgctgccggcaaactcaccaaggtcaagaactcttacaagatcgctgcaaagcctgttgcttctgtgaaaaagacatctgtctctgcc

SEQ ID NO: 3461 - DNA, 228 bp, Lilium asiatic
  Clone ID: LIB3230-006-P1-K1-D1
caaactcattacaccaatgatctgctcttgtttcatgacaacaagcgctaaattgagcgcggagatgcatttgtttaagactatgaaatcctacaaatggatctgactaccgatgctaatatagccgaagccgaccatcatgcgaaactagcacttaaaacatgtaaagatggactctctaatgcaaggctatggaatccttgtgacagagaatgcctaaaccatgac

SEQ ID NO: 3462 - DNA, 334 bp, Lilium asiatic
  Clone ID: LIB3230-006-P1-K1-D10
ccaatggcacagccacggacagcgacaccaaaggaagcaagagatggaggaaggccaagggggctgcggcctcagccagcagcggctgggaggttgagtacggcagcggcagcgagggctacagcggcaatgcgggtgcgaagaagcgggtgatggtggtcatcgaccagactacggggacgaagcatgcgatgatgtgggcgctcacgcatgttgctaacaagggagatctgctaacactcctccatgtcgttgctccggcggagcaccaccggagggatgagactcccatgcttgctagctcgctgggggcgctctgcaaggcctgcaaacc

SEQ ID NO: 3463 - DNA, 272 bp, Lilium asiatic
  Clone ID: LIB3230-006-P1-K1-D11
accgggggtgggttatttccaatttcacagccaccgacagcaacaccaacggaagcaagagatgtattaaggccaatgggctctgcccctcaaaacgcatctgttgtctggtcaagtacgataatagaagaaaaggctacagcaacaatgctgttgctaagaagctaatgatagtggccaaccatcagactacgaatacgaaccattccatgtatttaccacctcactcattatgcttacaagggcgaatcccttacactcctacatatatt

SEQ ID NO: 3464 - DNA, 243 bp, Lilium asiatic
  Clone ID: LIB3230-006-P1-K1-D12
cggacccatttgtctactcgctttttatgataacgcgagcaaccaactcggggggggagaatgattatttcactgactcgaccagatcatccaaatgaggccaaccatgacaccacaaccatttgattacattatcacaaattagctcttattttatcattgtccccaacttataaatgatcaccattcaacactgattatttaatacttctgaatccttctcaatataccatattacataat

SEQ ID NO: 3465 - DNA, 241 bp, Lilium asiatic
  Clone ID: LIB3230-006-P1-K1-D2
gacctacgtctccgcaaacacatacaacttatctctggtctatattacacgacaacaaccgacaaactgagcggtgagatactatatctttcgaatcccaaatccaacaaatagatcttagaaccccaaccaacatagccatacttgaccatcaaaagaaaacaaccttataaattccgaaaagatggacttccaaatacagatgcatataaacctttcgacaaaaacgccaaaaccaatt

SEQ ID NO: 3466 - DNA, 149 bp, Lilium asiatic
  Clone ID: LIB3230-006-P1-K1-D3
ggcgcacattacctgaacaaagatcattatcttcatcctcaaagatcctcaactggagggggacacatctaagatttcgattacctacatgcataaagaccggatctagcagataaatattaccacgacaccaatcaagaacctatcat

SEQ ID NO: 3467 - DNA, 396 bp, Lilium asiatic
  Clone ID: LIB3230-006-P1-K1-D4
gaacgatacaaggaattaaatgattatgatcgtataatcaagaatattgaaaggggagaggcaaggatttctaggaaagatgagataatgaaagcaattggcaagaagttggatcgctacaagaacccttggctggaactgaagattcagtatggtcagaacaaagggaagttgtacaatgaagaatgtgatcgttttatgttatgtatggttcacaaacttggttatggcaactgggatgaactgaaagctgctttccgcacttcacccttgtttcgctttgactggtttgtgaagtcccggacaactcaagaattggcgaggagatgtgatacccttatcaggctggtggagaaagaaaatcaagaatttgatgagcgtgaacggcaagctcgg

SEQ ID NO: 3468 - DNA, 372 bp, Lilium asiatic
  Clone ID: LIB3230-006-P1-K1-D5
gaacgatacaaggaattaaatgattattatcgtataatcaagaatattgaaaggggagaggcaaggatttctaggaaagatgagataatgaaagcaattggcaagaagttggatcgctacaagaacccttggctggaactgaagattcagtatggtcagaacaaagggaagttgtacaatgaagaatgtgatcgttttatgttatgtatggttcacaaacttggttatggcaactgggatgaactgaaagctgctttccgcacttcacccttgtttcgctttgactggtttgtgaagtcccagacaactcaagaattggcgaggagatgtgatacccttatcaggctggtggagaaagaaaattaagaattt

SEQ ID NO: 3469 - DNA, 286 bp, Lilium asiatic
  unsure (1)..(286): unsure at all n locations
  Clone ID: LIB3230-006-P1-K1-D6
cccacgcgntccggaggaagacaatcatttctctcaaggttttctcttgtaggaccagaacaatcgaaacggggggaggagctgcttctttttctcgcaatgatcatacanaactaaatgcaagggaaaagggtcaaaatctggtgcttcaatgaaatgtcctgagtgccagggatctggtatcaaggtcttaatcccacagctaagacctaccatgattcaacatatgcagcacccttgcaatgagtgcaaggccactggaaaaagtatcaatgattaacacctt

SEQ ID NO: 3470 - DNA, 399 bp, Lilium asiatic
  Clone ID: LIB3230-006-P1-K1-D7
gaggatgtggttcatcctctcaaggtatctcttgaggacctgtacaatgggactgcgaagaagctctccctttctcgcaatgtcatttgttctaaatgcaagggaaaagggtcaaaatctggtgcttcaatgaaatgtgctgggtgccagggatctggtatgaaggtctcaatccgtcagctaggaccttccatgattcagcagatgcagcacccttgcaatgagtgcaagggcactggagaaagtatcaatgataaagaccgctgcccgcagtgcaagggtgagaaggttgttcaggaaaagaaagtcttggaggtgcatgttgaaaagggtatgcagaatggccagaagataaccttccctggagaggctgatgaagcgcctgattgcgtcactggg

SEQ ID NO: 3471 - DNA, 371 bp, Lilium asiatic
  Clone ID: LIB3230-006-P1-K1-D8
gaggatgtggttcatcctctcaaggtatctcttgaggacctgtacaatgggactgggaagaagctctccctttctcgcaatgtcattcggtctaaatgcacgggaaaagggtcaaaatctggtgcttcaatgaaatgtgctgggtgccagggatctgttatgaacgtctcaatccgtcagctaggaccttccatgattgagaaaatccgtaacccttgcaatgagtgcaaggccactggagaatgcttcattgtaaaacaccgctgcccccattgcaaggatgagaaggttgttcatgaaaagaaactcttggaggtgcatgttgaaaagggtgttcaaaatgtccagaagataacctcccctgtagaggc

SEQ ID NO: 3472 - DNA, 291 bp, Lilium asiatic
  Clone ID: LIB3230-006-P1-K1-D9
ggaactcgtggacttaccctgctttttttacagcgcctaaagcccaacgggggtggccacttctataattttcgccttaatatgaatcccccactggattcacttataggttcaaagcatgctgaagatcttgatgctatgcttgccaattgttacataattgccatcaatacaccccttactgaaaaaacaatggggttgtttcacaaaaacacaattgccaaattcaagaatggacttttaatcttgaacaaatctcatcgtgcgataatgtacactaaagcaatttgc

SEQ ID NO: 3473 - DNA, 394 bp, Lilium asiatic
  Clone ID: LIB3230-006-P1-K1-E10
gagattgcttacacgcgcgagccagagctatcaagggaggagttgatcatgcatgcacgaaggcggagatggagggctctgatgatgtgaaggtacgaggagcagaggatcaagcagaggagatgcacatgcagacggaccggatcgagaaccaggagatcaagcaccgatgattgatggctctgatgaagtgaagttctgatcagacggcgaagagtgaggccgtgcatgaagactctagaagcttgtgtgagaggagatcaccattggttgtgcatgcatggtgctcggagaagaagggatgccaggcagaagacgagatctataaagccctaaggacgagcgatgaagttccccaagtctcagacgaagaaattcactcgttctctgagcc

SEQ ID NO: 3474 - DNA, 393 bp, Lilium asiatic
  Clone ID: LIB3230-006-P1-K1-E11
gagattgcttacacgctcgagcttgagttatcaagggaggagttgatcatgcatgcacgaatgcggagatggagggctctgatgatgtgaaggtacgaggagcagaggatcaagcagaggagatgcacatgcagacggaccggatcgagaaccaggagatcaagcaccgatgattgatggctctgatgaagtgaagttctgatcagacggcgaagagtgaggccgtgcatgaagactctagaagcttgtgtgagaggagatcaccattggttgtgcatgcatggtgctgggagaagaagggatgccaagcataagacgagatctataaagccctaaggacgagcgatgaagtttcccaagtttcagacgaagaaattcactcgttctctgagc

SEQ ID NO: 3475 - DNA, 380 bp, Lilium asiatic
  Clone ID: LIB3230-006-P1-K1-E12
ctgaacattttgtattccatggttcaactgagagcaggaaaatctatgctgtatgcatcattagttggttatggtatggagatgggagctatatacattgagtattcattttatggcgcggcgtgctcaggctatccaaacacagatgaagactaatccagttcgatgataaaggaatatatggcagaaataaagcgtcgtcttaatgtattatgaaatatgctaaaatggtgacggcgaatatgaactgcccagctttacacaacttgaggagaagccctctaattgcgcaggcgatattcgagtagatatatatcattgacggaatgatgcatatcaagtaggcagtaaaaaccataacttttactattgggtacagg

SEQ ID NO: 3476 - DNA, 363 bp, Lilium asiatic
  Clone ID: LIB3230-006-P1-K1-E3
cgctctgctctttcctggcggcgatcttggcttcctcatcgggcgaatcactcggttgagtgtcaagatgacgaccaccaaaattatcggagcggtggcggcatcattcgttatcgcatatgcatgtgactacgtcatctctgtcaaaaagatttttgatggtaccacccttcacactgtcactcacaaggtgtgttgcgaagcgactgataggcagtttcaggcgtggcctcgtactggaggaccaccagtcgtcatgaaccctatcagccgacagaacttgattgccaagccatctgaatcctaaagatagacatgtacggggagttcatattttgctggtgataagaaagtatgatatgg

SEQ ID NO: 3477 - DNA, 223 bp, Lilium asiatic
  Clone ID: LIB3230-006-P1-K1-E4
tttgtatctatatcggatttgatacaattagagtaacagtcagagcagctaaaatagtgtaaatttatatgattggtatttactacaatattccaatattcccacaaacaagatacacaattatctcgcagataaattgattggcaatttaatcaaatataccagaattatctcccagataaattgtttggcaatttgatcaactataccagaaatgatcgat

SEQ ID NO: 3478 - DNA, 363 bp, Lilium asiatic
  Clone ID: LIB3230-006-P1-K1-E7
gaaacatggcttaattctctaatgatttactgacccaccctcaacaagggggcggggcaaaaactatatatttataactattccatactgaacaaattcacggaaaaaatacttaaatgcctctctctaataaaactcacctccagccaactatcacttatgatcttctgactccataataaattaacccttattatacagaacacatattactcatctaacaagtactgctactctcgaataaatcttccatcataaacacctaatcctctattacatgaatgcgtatgtttttaatgaacagaaacttcagatcttcatcctgcaaaataaattataaacctctttaaaataaattcccct

SEQ ID NO: 3479 - DNA, 395 bp, Lilium asiatic
  Clone ID: LIB3230-006-P1-K1-E8
ggaacatggcggagtgcgtgatgtaactactgttgtactctcggagtggcttaagggcaaaaaccagagatggaaaattgttccttactgaacaggttaacggagatgatacttgtgtgcctctgtcttagagttctcatctccagtgtactgccacttcgggtcttctgcctgcagaataagttaagccttgttgaggtgaacacatgtttctcatctccagtgtactgctacttcgggtcttctgcctgcagaataagttaagcctctttgaggtgaatgcgtgtttgtttagtgtactgctacttcgggtcttctgcctgcagaataagttataagcctctttgaggtgaatgcgtgtttgtttatcatatgagagacagtacaagtttatg

SEQ ID NO: 3480 - DNA, 389 bp, Lilium asiatic
  Clone ID: LIB3230-006-P1-K1-E9
gcagatcgtcggtctaggtttgttcaatcccacaaaattgttagggttttgtcaggtttgatttgtaatcgctgtttcaattgatttcatttacttaatcccaggcttgatcgtgatctcggctttgatcatatggaaggggttgatgtgcgtcaccaggagtgagtcgccggtggtggtcgtgctctccggaagcatggagcctggatttcagagaggggatatcatgtttctacacatgagcaaggaaccaatccgaaccggtgaaatcgtcgtgtatcatcttgatggacggaaaattccaattgttcatcgtgtaactaagtagtttgataccctatggacgcgaccatgcactttaattgaagtaaatgcttactaatatgggc

SEQ ID NO: 3481 - DNA, 259 bp, Lilium asiatic
  Clone ID: LIB3230-006-P1-K1-F1
cccacgcgtccgcccacgcgtccgagagaaagtccgaaaccaaacaccagcaatgggaagagcattcgggtatgggatactcggcgggggggtccccgccggtacgccggccctgaattcgcaagaaggggatctctcatgcgaggcttgcatcatctccgaagaatcggttgcaccttatgaaacgcctgcactaagtaaaggttttttactttcagaagcacctgcacgccttccatcatttcacacttgccgttgc

SEQ ID NO: 3482 - DNA, 395 bp, Lilium asiatic
  Clone ID: LIB3230-006-P1-K1-F10
gtaactctgtacgtgatgttggtgggaggatatccctttgaggaccctgatgaccccaaaaatttccggaaaactattggtagaataagatcggttgaatataaaatcccggatcatgtacacatatctgaagaatgcaagcagatcatttctcgtatcttcgtcgccaacccagctaagaggataactataaaggaaattaagagccacccctggttcttgaagaacttaccaaaggagttaagggaggcagcacaggcggtgtacttcaagaaggacaataattcatcgaccttctccccccagactatcaacgatatcacgaggattgtcaatgaagcaaggattgttccgtcttcatccccacctgttcctgaattcactgaagaagatga

SEQ ID NO: 3483 - DNA, 378 bp, Lilium asiatic
  Clone ID: LIB3230-006-P1-K1-F11
ctgactcttgactgcatgcagtttcgtttacaccccaggaaagacacaggggccgcggagagcctacaaccactctatatggcgaatacaatcattccacaatctcaaacgatatcataaccgcatatgatgacaaaacgagctacacattcatattgtatcagtcagactcccatctcaagaatagctatacaagaaatctatagacgaccatggttctcagagaaactacaccaaactggttaaaggttgcatcacacaccataacctgtcaacaagaacaataatgccttgacctcttacccccagactatctactatattacaaggattgttactgtagcatggataggcccatattaatccccaccattttct

SEQ ID NO: 3484 - DNA, 399 bp, Lilium asiatic
  Clone ID: LIB3230-006-P1-K1-F12
cggacgcgtgggtgccgatcctgcagtctgtccgaagattaagaattcaggtgaaccagaggattgtttacaagggtgctctctactacatttagcatgtcaaactggtgatcctgtaatgctggagttgttgctccagtttggtgctgatataaatgttcaagactttcatggaaggactccactccatcattgtatcttcaagaagaatgatgccctcgctaagtatctgattaggaggggagcgcgcacatcaattacagatggtgggggattgatacctctggaaaggaaaatggagttgggagcaataactgatgaggaactgtttgttttgcttactcggaatgaatgaaacaatcggccataatgaccagagttcaccatagtaagtatatt

SEQ ID NO: 3485 - DNA, 396 bp, Lilium asiatic
  Clone ID: LIB3230-006-P1-K1-F2
cggacgcgtgggtgctgatccaagacatggccgttatctcactgcctcggccatgttcaggggcaagatgagcaccaaggaagtcgatgagcagatgcttaatgtccagaacaagaattcttcctactttgtcgagtggatcccgcacaatgtcaagtcaacagtgtgcgacatccccccaattgggctgaaaatggcagccactttcattgggaactcgacttcgatccacgagatgttcaggcgtgtcagcgagcagtttactgctatgttcaggaggaaagctttcttgcattggtacactggagagggcatggacgagatggagttcactgaggcggagagcaacatgaacgatctggtttcagagtatcagcagtaccaggatgcaacggc

SEQ ID NO: 3486 - DNA, 398 bp, Lilium asiatic
  Clone ID: LIB3230-006-P1-K1-F3
cgctctgctctttcctggcggcgatcttggcatcctcatcgtgcgaatcactcggttgagtctcaagatgacgaccaccaaaattatcggagcggtggcggcatcatttgttatcgcatatgcatgtgactacgtagtctctgtcaaaaagatttttggtggtaccaccccccacactgtcgctgacaaggagtggtgggaagcgactgataagaagtttcaggcgtggcctcgtactgctggaccaccagtcgtcatgaaccctatcagccgccagaacttcattgtcaagccatctgaatcctaaagatagacatgtccggggagttcatattttgctggtgataagaaagtctgatatggcggtttttgtttaagacttttaaatgtagtttctg

SEQ ID NO: 3487 - DNA, 401 bp, Lilium asiatic
  Clone ID: LIB3230-006-P1-K1-F6
gcttttgggaagtcttgggggacttttttcaaagtcttggaagccggtgaagagccgccaattaaaggggcctgttattgcaagagatgattcttttatgagaaggggcagccacatggagcagagacaaaagctggggctatcagcccctcctaagatccaatctaatccccgtcaatacccttctgaacacacaactgcattgggaaaaattcaggttgagcacgccaagcaagatgacactctttcttatgttagcgacttgttgggccagttaaaggaaatggcaattgacatgggttctgaaatagacagtcagaacaagggtctggatcatatgcaagaagacgtcgagattctcaatgacagagtcaagggagcgaatcagcgggcacgacgac

SEQ ID NO: 3488 - DNA, 377 bp, Lilium asiatic
  Clone ID: LIB3230-006-P1-K1-F7
ctcctctctcttcctcaaagatgccgtagcagatccatgagataaaggatgtccgtgctcactgcaaggaggaaagatgcacgatcggtgaagataaagaggagcaagggtgtagttaagttcaaagtgagatgctccaaatatctttataccctatgtgtgtttgactctgagaaggctgacaagctgaagcaatctcttcccccaggtttgagtgtgcaagatctgtgaagttgtctagagagatgttattgggtgatctcttgacatgggatgaggtttttgactctgttatcactcagtttctgctggggtttgttactttggaattgatacttactagagatttttctgccgtaagcttatatatctgctgc

SEQ ID NO: 3489 - DNA, 197 bp, Lilium asiatic
  unsure (1)..(197): unsure at all n locations
  Clone ID: LIB3230-006-P1-K1-F8
gtaacatctctatctccgagaattcatttccaacccaccaaatcaacgatgggcggctcaatgaaaactttttatacacccnacccnacaaataccataaaccccaactgattccatcaacctcaaagtgatatactccacatatccttaaaccctttacgtacaagactctaccaacactttcacttcaaaacaaa

SEQ ID NO: 3490 - DNA, 190 bp, Lilium asiatic
  Clone ID: LIB3230-006-P1-K1-F9
ggaactccgcacatgatgttggtttaatgatatcccaaccacgaccccgaggaggggcaaaatctaaattatgactattcctacaatacaaccggtcgaatataaaatgcatcatcatgtccacatctttaaagaatgcatgcatatcattactactatatctttctcctacctatataagatgataact

SEQ ID NO: 3491 - DNA, 394 bp, Lilium asiatic
  Clone ID: LIB3230-006-P1-K1-G1
aaaccctcggttccgggatccacttcctcatcccgggggttcaccgcatcgcctacgtccactctctcaaggaggaggccattcccattgaccaccagtccgccattacggaggataatgtcagcatcaacgttagcggcatactctatgtcaagatcattaatccttaccgagcatcctacgcggtgaagaatactctctttgccgtgatcatgatggctcagacgacaatgtggagcgagctggcgaagagtacactagacaagataattgtggagagagatgtattgaacaaggaaattgtgaatgcaatcaatactatagcgtctgcttggggtgtagagtgcattagatgtgaaataaatgatatctcccttccggatggagtgaatgc

SEQ ID NO: 3492 - DNA, 395 bp, Lilium asiatic
  Clone ID: LIB3230-006-P1-K1-G10
gcagttcggcatcggcggggcgctgccgccgaagagggatctacacaggttcgtgaaatggcccaaggtagtgaggatccagcgccagcgcaggatcctgaagcagaggctcaaggttcccccggcgatcaaccagttcaccaggactcttgacaagaatctcgcaacaaacttgttcaagatgcttttgaagtacaggcctgaagacaaggctgcaaagaaggaaaggcttctcaaaagggctcaggcggaaactgaaggtaaaacagtagaggtgaaaaagcccattgtagtgaagtatgggcttaaccatatcacgtacctcattgaacaaaacaaggcacaacttgtagtcattgctcatgatgtggatcccatcgagcttgtggtctggc

SEQ ID NO: 3493 - DNA, 402 bp, Lilium asiatic
  Clone ID: LIB3230-006-P1-K1-G11
cggacgcgtgggtgcggtcagtctcgcttactcctcaggatagacagaggggctcggagagcctacaaccactgtcaatggcgatgacagtcattccacaagctcgaacgatatcaaaactgttgcggaggtcagaaggagttacacctccaaattggagcagtcagagtcgcgtaggcaggagttgctggtcaagttagcttttgaggagcatcgtggtcaggagttcaccaagactgtcagaaagttgcctcatgcaccaaaacatgttgctagagtggggaggccttcggggcttacaaagaggcaaaatgataaaatcaaaacatcgaagcaattggatgaagaggcagagaaaattttcgaggatttcctttcgagtattgacggtactgatatatc

SEQ ID NO: 3494 - DNA, 314 bp, Lilium asiatic
  Clone ID: LIB3230-006-P1-K1-G12
cggacgcgtgggtgtcgatcttatcaattagccggactggtttatggagaggagcgcggaaggtaaggtgcctgtgttcaagggggatgaccgtaagtggatccctgattatgatgtgattactcagatcattgaagagaagtaccctgagccgtgtatggtgacgcctccggaatactcttcagtgtgatccaaaatattatctacatttgtcaagtttctgaaaagcaaggatcctaatgatggatcacaacaggcattgctcgtagaactgcatgctctggatgaacatctctaagaacatggcccatatg

SEQ ID NO: 3495 - DNA, 384 bp, Lilium asiatic
  Clone ID: LIB3230-006-P1-K1-G3
ctcagatctctcactaatggcgcccaaggccgagaagaagcccgcggcggagaagaagcccgcggccgtcgaggaggagaagaaggcggttccggcggagaagaagcctgctgagaagaagcccaagggcggaaagaaggtcccggcctcgaaggagggggcctctgacaagaagaagaagaggtcgaagaagtcggtggagacctacaagatctacatcttcaaggtgttgaagcaggtccaccctgacatcgggatctccagcaaggcaatggggatcatgaacagcttcatcaacgatctctttgagaagatggctcaggagtccgcccgccttgctcgctacaacaagaagaacaccatcacctctcgggagattcagac

SEQ ID NO: 3496 - DNA, 404 bp, Lilium asiatic
  Clone ID: LIB3230-006-P1-K1-G5
gaaattgccagagggttgtggatatgatttccagatgcagtacggatccattggatggtccgttggagcgactcttgggtacgcccaggctgcgaagaataagcgtgtgatcgcctgcattggtgatggaagctttcaggtgacagctcaggatgtgtcgaccatgctaaggtgtgggcagaacaccatcatcttcctcatcaacaatggtggatacacgattgaggtcgagatccatgacggaccttataatgtgatcaagaactggaactacactggtctaatggaggcgatccacaatggcgatggaaaatgctggactgcaaaggtgaaatgcgaggaggagctgaaagaggcgatcgaggcggctactgggccacagaaagaaagtttatgtttcatcg

SEQ ID NO: 3497 - DNA, 367 bp, Lilium asiatic
  unsure (1)..(367): unsure at all n locations
  Clone ID: LIB3230-006-P1-K1-G6
accggatatatngtgaagagttcaangaaaacacgtatggtgcaactcgcgagcagtttgtctaatcgctagaatgacataggacgtctactcatagaacagtcgtctcaaatctatcnnaactatgattggaatggcatgatcgcaaggatctacccaacaaacacttatcccctcatcaagcaacgggttgggagtttacacgtatatgtgatacgatggctttcgcgtattgcacactgctgaatgaanataatcctgaaagatgactgctaagcgtacgcaaaagggagaatcccttcatcacatgttgcaactcagtggaggaaatgggctatctacanagggcaaatgagcctcgattctt

SEQ ID NO: 3498 - DNA, 370 bp, Lilium asiatic
  Clone ID: LIB3230-006-P1-K1-G7
cgaacaggctcatcaccgcgaaggatcttgcggcggtccagatcaacatcgggcgtttggatgagagcggggtttacaccggccagttcactaccttcgccctttgcggcttcatccgtgctcagggtgatgctgatggtgctctggaccgtctttggcagaaaaagatagtagaagctcgccagcagtacaaagtatctgtagggcgttttgcattggaagatctggttttagtttcaacatatgttactttgacctctactagttactctatgctttggttattttgtttgcccggttggacaagatgaacgctggccttcatgtttgacttttaaatttaatttgactttcttttcctaagtgatta

SEQ ID NO: 3499 - DNA, 380 bp, Lilium asiatic
  Clone ID: LIB3230-006-P1-K1-G8
ggaacaggctcatcaccgtgaatgatcttgcagcggaccaaatcaacattgggcgtttggatgagagctttgtttacaccggccattccactacctaagccctttgtggcttcatacgcgctcatgttgatgctgatgatgctctggaccgcctttggcagaaaaagaaagtagaagctggccagctgtaaaaagtacctgtacggcgttttgcagtgaaagatctggttgtagtttcaacatatgttagtacgacctctactagttactctatgctttggttattttggttgcctggtagtacaagatgaaagctggcattcatgtttgactattaaatttagatggacttattttttctaagtgattataattcttta

SEQ ID NO: 3500 - DNA, 292 bp, Lilium asiatic
  Clone ID: LIB3230-006-P1-K1-G9
gcaactcggcatttgctgttcgtctgttttctaacaggtatctacacaggttggcgggatgatccaacgtattgagaatccaacaccaccacaggatcattatacaaatgctcaaggatctccacatcatatcaaccaattcacgcggactattgacaagatatttcgtaacaaacttatttaagatgctttctatatacaagcttaaaaaccactcttcaaagaaggaaagccttctaaaaaaggctaaggcggtaactgaagctaaaacatttaaggtgaacaatcctat

SEQ ID NO: 3501 - DNA, 250 bp, Lilium asiatic
  Clone ID: LIB3230-006-P1-K1-H1
cacccacgcgtccgaaccccaccaaaaatattccacttaatcttatttcaaacgccacacacaacacgggccgggctgctgcaaacttttaaccctattaaaacccccccaaaaagcaaacccataatgcctttgaaaactcagcccatgcacaaaccaccctgcctcaattaaaattactgcctcacctcctccctcaaaatctaatttccttgatagacatcattactccaaccaaccacaaatactt

SEQ ID NO: 3502 - DNA, 408 bp, Lilium asiatic
  Clone ID: LIB3230-006-P1-K1-H10
gggagatcgaggatggggatgatgaatgtggcgctggtgcacccggaggatctgggcgtgctggtgaagatgaagagggcggcggcacaggtggagaagcagataccgtctgatccccactgggccttctgctataccatgctccataatgtctaccgcagcttcaccttcgttatccagcagctcggcaccgatctgcgctaatgcatgactgcgtattctatctggggctcagaaccctggatactgctgaggatgatacaagcataccggaggatattaaagtgccaattctggcatcttttcatcgtcacatatgtaattctgactggcatttctgatgtggttcgaaggaattcaaggtgatgatggataactttcgctacatttcaactgctttcttggagc

SEQ ID NO: 3503 - DNA, 410 bp, Lilium asiatic
  Clone ID: LIB3230-006-P1-K1-H11
cggacgcgtgggtgcggtcagtctcgcttactcctcaggatagacagaggggctcggagagcctacaaccactgtcaatggcgatgacagtcattccacaagctcgaacgatatcaaaactgctgcggaggtcagaaggagttacacctccaaattggagcagtcagagtcgcgtatgcaggagttgctggtcaagttagcttttgaggagcatcgtggtcaggagttcaccaagactgtcagaaagttgcctcatgcaccaaaacatgttgctagagtggggaggccttcggggcttacaaagaggcaaaatgattaaatcaaaacatcgaagcaattggatgaagaggcagagaaaattttcgaggatttcctttcgagtattgacggcactgatatatcattatatg

SEQ ID NO: 3504 - DNA, 401 bp, Lilium asiatic
  Clone ID: LIB3230-006-P1-K1-H2
atcgacaccaaatatgtaccaattaagcctattggaaggggagcatatggcattgtctgtgcttctgtaaacaaagaaactaacgagaaggttgccattaagaagatccataatgcctttgagaatcgtgtcgatgcattaaggaccttgcgtgaattaaagttactgcgtcacctgcgccatgagaatgtaattgccttgagagacatcatgatgccaaccaaccacaaatacttcaaggacgtctacctggtctacgaactcatggacactgatctacatcagattatcaagtcctcacaggcgctatcaaatgatcactgccagtatttcctcttccaattgcttcgaggattaaagtatcttcactcaacaaatatactccatagagatttgaagcc

SEQ ID NO: 3505 - DNA, 403 bp, Lilium asiatic
  unsure (1)..(403): unsure at all n locations
  Clone ID: LIB3230-006-P1-K1-H3
cgcgtncgatcgacaccaaatatttaccaattaatcttattgtaaggggagcatatcgcatgntgctggtcttctgtttacaaagaaactaaccacaaggccgccangaagaagatccataatgcctttgacaatcgtgtcgatgcattaaggtacctttcatgaagcaaagttactgcgtcacctgcgccatgagaatgtaattgccttgagagacatcatgatgccaaccaaccacaaatacttcaaggacttttacctggtctacgaactcatggacactgatctacattagattatccaagtctcacaggcgctatcaaattatcactgtccaaaaattcctcttccaaatgctaccaccaacaaagtaacttcactcattaaatatacttcatacata

SEQ ID NO: 3506 - DNA, 410 bp, Lilium asiatic
  Clone ID: LIB3230-006-P1-K1-H4
cgccctcgtcaactatgggaaggactacgggaggctcgttgtcatcgtcgatgtgctcgaccagaaccgagctcttgttgatgcccctgatatggttcgaggtcaaatgaatttcaagaggttatccctgactgacataaagattgatatcccacgaattcccaaaaagaagtcgttaatcgctgccatggaagctgcggatgtgaagaacaaatgggagaacagctcatggggaagaaagttgatcgtgcaaaagaggagggctgcattgaatgactttgacaggttcaaggtcatgctggctaggattaagagaggaggtgctatcaggcaagaacttgcaaaactgaagaagcaggccacttaaggtatcaccgaattgctgaaatcttttcgggttattgttacca

SEQ ID NO: 3507 - DNA, 416 bp, Lilium asiatic
  Clone ID: LIB3230-006-P1-K1-H5
cctccgtaccgataccggaaggccgacccacacctacgggtgacatggaggatagggatgatgaacgtaggctctgatgcaccctgaggatctggacgggctggtaaagatgaatagggcggccgcccaagttgagaagcagatcccggcttatcccgactgggccttctgctataccatgctccagaaggtctcccgcagcttcacctacgtcatccattcactcggtaccgatctccgcaatgctgactgcgtttgctatctggttctcagagccctagatactgttgcggatgatacaagcatacctgaatgtattaaagagccaattctggcatcttgttcatattacatatataattcttactggcatttatcatgtggaactcaagattacaacgttttgatggttaact

SEQ ID NO: 3508 - DNA, 449 bp, Lilium asiatic
  unsure (1)..(449): unsure at all n locations
  Clone ID: LIB3230-006-P1-K1-H6
cacgcccgtaccgagtcccacccnntcctctcccggnncggctcctgatttccaaccccctcatcagataccaatgagagggtcatgtgctgcctacnnctcctggctttacccttggtggaaacctcttagcccgtcaagcaagggatatcnaagcatanttcttggttcaagttggtgcctgatgcctgaagatgagccggattgagttttntgcttgctgaagttaaaggcaaggatataacntgagttgattgcttctggaagagagaaatttgcatctgttccatctggtggtggtggtgtggctgttgcagtgtcggcaggtggtggtggtgcagctgcccctgcagcagcagctgctgagccgaagaaagaagagaaggtggaggagaaggaagaatctgatgatgatatgggatttagcttgtttgattaagtgctgcgct

SEQ ID NO: 3509 - DNA, 392 bp, Lilium asiatic
  Clone ID: LIB3230-006-P1-K1-H8
cgaacaggctcatcaccgcgaaggatcatgcggcggtccagatcaacatcgggcgtgttggatgagagcggggtttacaccggccagttcactaccttcgccctttgcggcttcatccgtgctcagggtgatgctgatggtgctctggaccgtctttggcagaaaaagaaagtagaagctcgccagcagtaaaaagtagctgtagggcgttttgcagtggaagatctggttttagtttcaacatatgttactttgacctctactagttactctatgctttggttattttgtttgcctggttggacaagatgaaagctggcattcatgtttaacttttaaatttaatttgacttttttttcctaagtgattatgattctttatgttatttgag

SEQ ID NO: 3510 - DNA, 393 bp, Lilium asiatic
  Clone ID: LIB3230-006-P1-K1-H9
gggagatcgaggatggggatgatgaaggaggcgctgatgcacccggaggatctgtacgtgctggtgaagatgaagagggcggcggcgcaggtggagaagcagatcccgtcggatccccactgggccttctgctataccatgctccagaaggtctcccgcagcttcgccttcgtcatccagcagctcggcaccgatctccgcaatgctgtctgcgttttctatctggttctcagagcccttgatactgttgaggatgatacaagcataccggaggatattaaagtgccaattctggcatcttttcatcgtcacatatataatcctgactggcatttctcatgtggtaccaaggattacaaggttctgatggataactttcgtaacatttcaact

SEQ ID NO: 3511 - DNA, 402 bp, Lilium asiatic
  Clone ID: LIB3230-008-P1-K1-A1
gaaggaaccggaaaaagatcctcacttattttcttgcaccttctcgaaagacgatggaaatgttacagaagtgtacaatctctcccaagatgatttgacgactgaagatatatttattctggactgtcattcaaacatttctgtttgggttggacagcacgtggattctaaaagcaaagcacaagctttaatcattggtgagaaatttctagaatatgactttcttatggaaaaaatatctctagaaacacctattatcattgttatggaaggaagtgagcctcaattctttactcgctttttcaacctgtgattcatccaaatcagcaatgcatggtaattcatttcagaggaagcttgcgatttttaaaacccgggtcactccaactttagacaagttca

SEQ ID NO: 3512 - DNA, 344 bp, Lilium asiatic
  Clone ID: LIB3230-008-P1-K1-A11
cggacgcgtgggcggacgcgtggggaggatcggttagggttttcccatcaatggcttccgactccatctcaatggaagagctacaagcgctgcagcggaaactgtggaagaagcagttcttcaaggaggcctgcgacagcatctcctacctccttcgagatcgatacccgtacgcctcccttaccctttgataatcgatgtactctgcagttagccgtgttgtaactgttattcagacaagatacactgcgcctggtttatggcttgctggcttaaggctttttgaatacatgaacatactggagagcgcatttttttagaatgaatatattaagaaatgtttt

SEQ ID NO: 3513 - DNA, 305 bp, Lilium asiatic
  Clone ID: LIB3230-008-P1-K1-A2
ggagtcgaaaaagattactaacccaattttattagcagcctcaataactcgaaggggctagcaaccaaacagttacgagtgccgctttctattgcgctggaagcagcatgcatccggattaggagggcagtcaccaccagctcaatggcgttggcgccgcctcgctagaactgagcctgagctcattctactatgcaccaccaagctctacctgacttcgttttgttgaatggcgtagcttgatttgtttgactgatcatgtttggatgctgtggcactgtactatatgaacattactgtatttt

SEQ ID NO: 3514 - DNA, 418 bp, Lilium asiatic
  Clone ID: LIB3230-008-P1-K1-A4
ccgctttgcagcgccaaaagatcaaacaccttgcgagctcgactaaatcaatggcggcggcgatccggcggctctcttccaacctcgccgccctcccgaccttctcctcctcccttcccatccgctcccccgtcgtttctcccccgtcggcggcccccgccttcccccgcccctcgccggagttctccatggagctcatggccgtccccaagaagaaggtctcgaaatacaagagaggattgaggaatggccccaaggctctcaaaccggtccccgtgattgtgcggtgcaagagttgtggcagagtgaagttaccacatttctactgttgcagcggggaaagaggtaacaccggtcctgattccagctgatgaaacaaaacaacatcccggaatggactttagagaattgcattaat

SEQ ID NO: 3515 - DNA, 408 bp, Lilium asiatic
  Clone ID: LIB3230-008-P1-K1-A5
tgctccatcagcccctcggaggtgcaagtggtcaagccatagatgtggagatccaggccagagagataatgcacaataagaacaatgtgaccagaattatctccagttttactggccgaacgttcgaacaggttcagaaagatatcgaccgagaccgatacatgtcaccaattgaagctgttgaatatggtattatcgatgctgtcatcgacagggattctatcattccgcttcaacctgtgccagagcgggtgaagtctaaaatgaactacgaagagatcaataaagatcctagaaaattcttgacaccggacattcctgacgatgagatatactaggcaatgctaatgcatttcttgctccttgtcgaatacagtgcggactgtagttactgtagacactattttt

SEQ ID NO: 3516 - DNA, 227 bp, Lilium asiatic
  unsure (1)..(227): unsure at all n locations
  Clone ID: LIB3230-008-P1-K1-A6
ctcagagctctctgctctaatagcgagcaccaccttctccagcgaactgcttctcctccatgagagcgatggtgataaggaccgactcaccagctctatctncaactgtactagacgcacgtcttcaacagagtgccgaaagatatctaccctcacccatacatgtcaccaattgtagctgttcaatatcgtattatcaatgctatactctacaggtattctatcat

SEQ ID NO: 3517 - DNA, 277 bp, Lilium asiatic
  unsure (1)..(277): unsure at all n locations
  Clone ID: LIB3230-008-P1-K1-A7
gctcagagcttctgctctaatagcgagcaccaccttctcggcgaactgctttctcatgagagcgatggtgataaggacgnncnnttcncnnnnatatttnntttttgctgtcttctacatttttgtgtgtgacctgcattgtgttttaaagcaagccccgctttttatcgttggcggagattccttcatttgactttttttttttgctacttggttgatccacaccattttttttgttttttttggacttgtgctcttattttttttcctctttttt

SEQ ID NO: 3518 - DNA, 122 bp, Lilium asiatic
  Clone ID: LIB3230-008-P1-K1-A8
cttttattcgttccatgatatgttgataaggattctagattgttcttggcgctagcaaaagtagaagtccagatgttcggggcccacatgggggacgggtaaatgtgaatatatcccttggg

SEQ ID NO: 3519 - DNA, 431 bp, Lilium asiatic
  unsure (1)..(431): unsure at all n locations
  Clone ID: LIB3230-008-P1-K1-A9
gaannnaagggncggcccacgcgtcccgaaggaaccggaaaaagatcctcacctttttttttgcaccttctcgaaagacgatgtaaaggttacagaagtgtacaatttctcccaagatgatttgaccactgaagatatatttattctggactgtcattcaaacatttttgtttgggttggacagcacgtggattctaaaagcaaagcacaagctttaatcattggtgagaaatttctagaatatgactttcttatggaaaaaatatctctagaaacaccaattttcattgttatggaaggaagtgagcctcaattctttactcgctttttcacctgggattcagtcaaatcagcaatgcatggtaattcatttcagaggaagcttgcgattttgaaaaccggtgtcgctccaactttaaacaagatcaaac

SEQ ID NO: 3520 - DNA, 414 bp, Lilium asiatic
  Clone ID: LIB3230-008-P1-K1-B1
gaaggaaccggaaaaagatcctcacctattttcttgcaccttctcgaaagacgatttaaaggttacagaagtgtacaatttctcccaagatgatttgacgactgaagatatatttattctggactgtcattcaaacatttttgtttgggttggacagcaggtggattctaaaagcaaagcacaagctttaatcattggtgagaaatttctagaatatgactttcttatggaaaaaatatctcgagaaacaccaattttcattgttatggaaggaagtgagcctcaattctttactcgctttttcacctgggattcagccaaatcagcaatgcatggtaattcatttcagaggaagcttgcgattttgaaaaccggtgtcgctccaactttagacaagatcaagcggcgcgtgcc

SEQ ID NO: 3521 - DNA, 373 bp, Lilium asiatic
  Clone ID: LIB3230-008-P1-K1-B2
ggagtcgaaaaagatcacgaacccaataatattagcagtggcaataacttgaaaacctaccaaccaaacggctacagtcccgctttctattgcgctggaagcagcatgcagccggatttggagggcagtcaccaccagctcaatggcgttggcgccgcctcgctagaactgagcctgagctcattctactatgcaccaccaagctctacctgacttcgttttgttgaatggcgtagcttgatttgtttgactgatcatgtggggatgctgtggcactgtactatctgaacattactgtagtttgtacgtcgagtatttgggattgtgctgtgaatttgtttggtctgtgtggtacatagtcacatcttctcgg

SEQ ID NO: 3522 - DNA, 419 bp, Lilium asiatic
  Clone ID: LIB3230-008-P1-K1-B5
tcttaactttcgattcatctttcgaaaaatatatatggaaagataatctaatagaaaaatatgggacaaaaaataaatccacttggtttcagacttggtacaacccaaagtcatcattccttttggttcgcacaaccacaaaattattccgcgggtatacaggaagatgaaaaaatacggaattgtatcaaggattatgtacaaaaaaataagagaacgtcctcaggtttcgaaggaatagcacgtatacaaataaaaaaaagaatcgatttgatccaagtcataatccatattggattccctaatttattaatagagggccgaacacgaggaatcgaagaattacagatgaatgtacaaaaggagtttcattctgtgaaccgtagactcaacattgctataacaagagttgaaaaacc

SEQ ID NO: 3523 - DNA, 274 bp, Lilium asiatic
  Clone ID: LIB3230-008-P1-K1-B6
tgactttaagatgttcatgtgcgtaaactagtcatacaggagataatctgcacaggtggatcgcgaattgatctctccctctctcgggatcttctacaagttacaaccacctttgaggctacctgtctcgctatctaagcttgtggttaccatcgattatgagacttttgtgtctatgatcgctattgacgcacttttatcgattctggattgatagtttggctactcgcttggttcgatacccacagaaactctgtctgataaacctatgatt

SEQ ID NO: 3524 - DNA, 413 bp, Lilium asiatic
  Clone ID: LIB3230-008-P1-K1-B7
gaaggaaccgaaaaatgatcctcacctatttttttgcaccttctcgactgacgaggttaaggtcacaatagtgtacaatttctcccaaaatgatctgacgactgaagatatatttattttggagggccattcaaacatttttatttgggttgcaccgcatgtggattattaaagcaaagctcattctttaatgcttgaccagacattactagaatatgactttcttatggaaaaaatatctctagaaacaccaattatcattgttatctaaggaagtgagcctcaattacatactcgctttttgacctgggattcatccaaatcagcaatgcatggtaattcatttcagaggaagcttgcgattttgaaaaccggtgtcgctccaactttagacaggatcacgctgtacgtgc

SEQ ID NO: 3525 - DNA, 320 bp, Lilium asiatic
  Clone ID: LIB3230-008-P1-K1-B8
ccaaactggtttttgttggggcttctctatatgcgctggaagcaagcatgcataccggattttggagggcagtcaaccaccagtttcaatggcggttggcggccgcctcgctagaactgagcctgagctcattctactatgcaccaccaagctctacctgacttcgttttgttgaatggcgtagcttgatttgtttgactgatcatgtggggaagctgaggcactgtactatctgaacattactggagttttgaccgtcagtatttgggattgtgctgtgaataagtttggtctgtgggtacataatcacatcttctcgg

SEQ ID NO: 3526 - DNA, 376 bp, Lilium asiatic
  Clone ID: LIB3230-008-P1-K1-C1
gactaaagctaggaatttacagtgatgcagggtctcaaacttgtagcatgcgaatgcctggatcacttggatatgaagagcaagatgaaaaaatatttgcctcctggggaagttgactacttgaagtatgacaactgtaacaaccagggtgtctctccacaggagaggaccctgatgtagtgttccagagatactgctattgctggaatgtttttccaattttccgtgtatgccgaagtttgtaatttttattgtatgtatgaacataaaaatatgtttaaaggtacaggattaggagtctaggctgtaatataatagttataatgaagtgatatatactctccggcgtgattttcgaaaaaaaaataacctctgt

SEQ ID NO: 3527 - DNA, 413 bp, Lilium asiatic
  Clone ID: LIB3230-008-P1-K1-C10
gtcagcctcggcagcggcggagaagaagcccgccgaaaagaagcccaaggctgggaagaaggtcctggcgttcaagggcaaggagggggagaagaagaagaagaggtcgaagaagtcggtcgagacctacaagatctacatattcaaggtcttaaagcaggtccaccctgacatcgggatctccagcaaggccatggggatcatgaacagcttcatcaacgatctcttcgagaagatggctcaggagtctgctcgtctcgctcgctacaacaagaagaataccatcacctcccgggagatccagacctccgtccgccttgtcctccctggtgagcttgccaagcacgcttgtttttaaggcactaatgctgtaaccaagttcaccaaggccttagttttacagcgtgtttaag

SEQ ID NO: 3528 - DNA, 170 bp, Lilium asiatic
  Clone ID: LIB3230-008-P1-K1-C11
gtcaactcgcagcggcggattttaatcccccgaaaagaacccaaggccgggaagaataatcttttttttcaaggccaaacacgcggaaaataaaaaaaagaggtcaaaaaatacatccgagacccacaagatctacatatacaaaggctaaaaacacgtccacacctgac

SEQ ID NO: 3529 - DNA, 192 bp, Lilium asiatic
  Clone ID: LIB3230-008-P1-K1-C2
gggaacccgtacgaacaaacagccactctctgttggcaggatccaccaatccaagcgccggcagccgatgttttttgtgacaacccctacatcgggctggaaccttaatgcagacggattagcaaggtaaataaaaccctctcacacgtggtagctactgactagaataaccgttcctgtgagcattctatg

SEQ ID NO: 3530 - DNA, 419 bp, Lilium asiatic
  unsure (1)..(419): unsure at all n locations
  Clone ID: LIB3230-008-P1-K1-C3
cggaacccggccccgcaaacagccccgccagccggcaggatccaccgatccacccgccggcggcggcggcggcggtgacgactccgacgccggctgcagccattacaccaggggcagcgacgagctaaatcagatcctctcccacgtccgatctacggacgagaatgccgcttcctgcgagcattgcctggatgagccggcgaggagaggaaacaaggaaaaagggggcaaggacaagggtaaacagcagaagaagaaatgtggggcaaagtcggagaccggtctcatgtgggtgtgtcttgactgccggaggtgcttctgtggcggggcggtcaaggacaccgagccgtacaggcacgtncgtcgccattcaaagcaggatcaccacccatgggctgtacggttcggtgatccactca

SEQ ID NO: 3531 - DNA, 416 bp, Lilium asiatic
  Clone ID: LIB3230-008-P1-K1-C4
ccctaatattgtgaagttggaagggttgattacttctcgtctatcatctagtatatattttgtattcgagtacatggagcataatcttgcaggactgtcatcttgccctgacattaaattcactgagccacaggtcaaatgctacatgcaccaattactatccagactcgaacattgtcattcacaaggcgtcatacattgtgacatcaaaggagcaaatcttctagttaacaatgaaggcattcttaaaattgctgattttggtctggcaaacttctccaatcctgcgaataagcaacctctgacaagtcgtgttgtgactatgtggtatcatccaccagagcttctacttggctcaacaactatgaagcaactgttgatttgtggagtgtgggttgtgtatttgtagaaatgtt

SEQ ID NO: 3532 - DNA, 285 bp, Lilium asiatic
  Clone ID: LIB3230-008-P1-K1-C5
ccctaatattgagaattatgaagggttttttacttctcgcctatcatctactggggaggttgaattcgagttcatggagcataatctcgcaggactgttatcttgccctgacattaaatttactgggccacatgtcaaatgctacatgcaccaattactatccagactccaacattttcatttacaaagcgtcatacattgggacaatcaaagaacaaaatttttaaatttacacaagaaagcattcttaaaaatgcctatattgggctggcaaacattctccta

SEQ ID NO: 3533 - DNA, 239 bp, Lilium asiatic
  Clone ID: LIB3230-008-P1-K1-C6
catgtgttttaaactagtcatcacaatagataatctgcacaggtggattgtggaattgatctttgtcctctcttggtgatcttctaagaagtttacaatcacctttgaggcatacttgtctgtctttctaagcttgtggtttaccatcgattatgagtcttttgtgtctatgatcactagtgaggcactctgatagattctggattgatagtttgtctacttgcttggttggataccca

SEQ ID NO: 3534 - DNA, 416 bp, Lilium asiatic
  Clone ID: LIB3230-008-P1-K1-D1
tgacagagctcaaccgcccagcaatggcggtcccctccccaaacccttctcatccgtctgattcttccccgagagctccccatcaccgttccttctccaacctccatcaccattgatcaccagagattatctccaccttccattccttctccaagcacccaccaccattggatcctctatggaccacaagccacagcagatctacaccgtccaaacccccctatgcagtgagccatctgatcttccatctatggctgtggataattcgtcatcaaaggctaagttcctctaaccttcctttattctattattatgaaagattaagaggtttttctgataagcttaattgttaagtgcagggaccactggtgaagaagcagcaacggcggtgatgtacgcgatcaggcttgaagcgt

SEQ ID NO: 3535 - DNA, 410 bp, Lilium asiatic
  unsure (1)..(410): unsure at all n locations
  Clone ID: LIB3230-008-P1-K1-D12
aaatcacacacatgctgaggtggtaatagaagaagattgggacagactgctgaagatcgaagaagaatatatcgggtacatctgcctacanatattgcagttcaaacctgacttgactgtaactgaaaaaggtactagcgatcttgcatgccattacttcaccaaagctggagtgagtgctatcatgagggtgtgaaagacctacaacagccggattgcaaaggcttgtggtgcggtgatagttaacaggccagaagcaattgcagagtgcaatgttggaaccgtggcagggctgtttgatgtgcacaaattaccggctgagtttaacttattcatcgtggactgccaagatgcaaaagcctgtactgtacttttaagaagcggctagtaggatattttgaatgaagttg

SEQ ID NO: 3536 - DNA, 312 bp, Lilium asiatic
  unsure (1)..(312): unsure at all n locations
  Clone ID: LIB3230-008-P1-K1-D2
ggtagccaaaacatgtttataaaagtgtcattcagtatcttgaaaatgngcacgggagggtaaatgtgtattttgttggtccaaacacagcccttgaaaacacacctccgccaaatggacttccatttgtgagtgataaggctacaatcatatttggagctgaagttacccatccggcgccagtagaagattctcaaacttcaattgctgcggcgggtgctacgaatgaaaggcctgaaaacaccaaatacaagggcctttgtctctgctcaactccatagaaaaacagaagacaatctcctactttttata

SEQ ID NO: 3537 - DNA, 129 bp, Lilium asiatic
  Clone ID: LIB3230-008-P1-K1-D4
cgggcgacccacgcgtccgcggcgcataggcggacacgtgggcttatcttgggcggacacgtagacagacgcgtgggcgccaaagtgatcttatcatcctaacaactatggtgatctgtgaaagcccat

SEQ ID NO: 3538 - DNA, 324 bp, Lilium asiatic
  unsure (1)..(324): unsure at all n locations
  Clone ID: LIB3230-008-P1-K1-E1
ggacgccaaaacacggncataaaagggccgtttccctatcttgagaatgcgcatttggagataaatgcgtttgttggtggccataacactgcctttgaaaatgtacttcagcctagaggacttccatttgtgagtagacttggattccttcttatttggcgctgatgattcccatctgtatcctgcagaagatacagaatatttactcggtgcagacgctgctatgcatggtggcatctgaacttccatctatgggtgccgatgatttgtcttcaatgcgtagaaaagctataaccttcctttattctattattatataaagac

SEQ ID NO: 3539 - DNA, 398 bp, Lilium asiatic
  Clone ID: LIB3230-008-P1-K1-E12
cggacgcgtgggtgtttaggcacttataacataaaattgcgacattgtgaccgagaccttgcacgtgttctcgcgtgcaccacttcacatatatttatatataaaataatatataaatatagggggaaaacggacatcaaaactatcggctgatttttttattctctccgagttcgtaaaataaaatattataaataaaataagtatatataataaataaataatatttttatatataaataattaaaaattaataaatatattattaaataataattatatatattatataaatattatattatattatgaagataatattatatatattatacttattctatatataatatttatatattaatccattatcattgatataaatattttttaattat

SEQ ID NO: 3540 - DNA, 417 bp, Lilium asiatic
  Clone ID: LIB3230-008-P1-K1-E2
gtttgccaaaacatgtttataaaagtgtcaagcagtatcttgagaatgtgtctttgaagataaatgtgaagtgttggaggtcgtaatactgttcttgaagatgcacttcggccaaatggacttccatttgtgagtgataaggctacaatcatatttggagctgatgttacccatccggcgcctggagaagattctcaatcttcaattgctgcggtggttgcttcgattgattggcctgagatcaccaagtacaggggccttgtctctgctcaactccatagaaaagagatgatatccgatctttatactgaacataatgaccctgcaaagggtcttgtgagggggggaatgatcagggagcatattggttgcattttatcgaaataacagacgaaagcctgtaagaattatattcta

SEQ ID NO: 3541 - DNA, 407 bp, Lilium asiatic
  Clone ID: LIB3230-008-P1-K1-E4
ccaccgaactagctcaccgctttatttctctgagttattcagtaaataggaaaaatgacaaaccttgcagtccccaacatactcaaacgaaagttctcatctctcactcgtcagttacacatccctccgaagcagattttacattcttgatatacttgtgaaggactccccgcctggctttgtaaggaggctggacccatttgttccgtcaagagataagcgctcagataagggagaagacactacatttacccggagtttctattgcaatcatgggatgtatcgtgaatggaccaggagagatggccgatgcagatttcgggtatgtaggtggtgctccgggaaagatcgacctctatgtcgggaagacggtggtaaagagggcaattgcgatggaacatgcaaca

SEQ ID NO: 3542 - DNA, 394 bp, Lilium asiatic
  Clone ID: LIB3230-008-P1-K1-E5
cggacgcgtgggcggacgcgtgggcggacgcgtgggcggacgcgtgggcggacgcgtgggcgccgaatgtgcgtgctagcctgagagcaatggtgtttgtgaaagcccagaaggccagggcctatttcaagcgtttccaagtcaagttcaagagaaggagagagggaaagactgattatcgtgccaggatccggctcattaatcaggacaagaacaagtacaacacaccgaaatatcgttttgttggcagatttaccaataaggatatcaccgcacaaatcatattcgcaagcattgctggtgatatggttcttgctgcagcttattctcatgaactccctcgctatggtcttgaaattggtctcaccaacttatgctgcagcttattgaactg

SEQ ID NO: 3543 - DNA, 409 bp, Lilium asiatic
  unsure (1)..(409): unsure at all n locations
  Clone ID: LIB3230-008-P1-K1-E7
cacgcgtccggnttgccaaaacatgtttataaaagtttctttctagtatcttgagaatgtgccttggaagataaatgtgttgtgttggtggtcgtaatactgttcttgaagatgcacttcggccaaatggacttccatttgtgagtgataaggctacaatcatatttggagctgatgttacccatccggcgcctggagaagattctcaatcttcaattgctgcggtggttgcttcgattgattggcctgagatcaccaagtacaggggccttgtctctgctcaactccataaaaaagagatgatatccgatctttatactgaacataatgaccctgcaaagggtcttgtgagggggggaatgatcaaggagcatatggttgcattttatctgtataacatactaaagcc

SEQ ID NO: 3544 - DNA, 409 bp, Lilium asiatic
  Clone ID: LIB3230-008-P1-K1-E9
gcgagctgcggagttggcattggctgtacaattgacaacagaggtggtggtggatgtacttcatcttgcgagacagtgtgatgcttcacaaatgtacattcgatgcatgaagtggattgccaagaactttgcagctgtcgaggagaccgaggggtggaggtttgtacgcgcgcatgatccctggctcgagctcaacgtactgcagttcctccaggatacagatctaaggctaaatcgcagaaggaagaagatgtgggagcaagggttatacttgcaactgagtgaagcgatggagtgcctggcacacatctgtactgagggttgcattggcgtgggtccctacgataaggaacctcgcaagggtccatgtgcgagcttcaaaacatgccagagcctacaacttctcatt

SEQ ID NO: 3545 - DNA, 432 bp, Lilium asiatic
  unsure (1)..(432): unsure at all n locations
  Clone ID: LIB3230-008-P1-K1-F1
gacccacgccaccgngcaagaagacaaaagatcacgagtcatatatatccagaaccatcggaggagcgggggcgggaaactccatattgttcggacgaagaccaaaacacacaaacgaacaaaacggtcaaggaacaagacccaacaattaccgctgaggcaagtaacacgaggcagaaaattactcacgctcacaagtccaccactccgaacacccctactcaatagcgtcaacagaatgacactgaggaacatcacagcccatatccagtggaaacacaaagcgtgaaaaccacacaccgaaacaagcaaaaaaaccctgccccaaaagaagaaaggcccccccacctactaatgaggacccacacaatcactatcggacaaaagactattggaaaactctaaaaatccacagagaacctcacctctacc

SEQ ID NO: 3546 - DNA, 253 bp, Lilium asiatic
  unsure (1)..(253): unsure at all n locations
  Clone ID: LIB3230-008-P1-K1-F10
cgctggttgatgtactgccgcctgaggccgattcgagtatttcgntgcggaggcagtctgagaagttgggtgtgacttacagagataatggcggctgcgacatacaaaaacaagaaattcgtgaagccagacaattaccggagacacatcatgatttgtacaagcagatcggtattgaacccccgagaggggggcttctttatggaccaccaggcacttgcataaactatgcctcgcttaaggctgttggaaa

SEQ ID NO: 3547 - DNA, 251 bp, Lilium asiatic
  Clone ID: LIB3230-008-P1-K1-F12
cagacactgagtgcttacgaattttatacacaaaatacccaaaccgaggccgattcctaacacttgttttcgcgttcaccactacacaaatttatacatataaaaccatacataaatattcggtagaaaaccaacaccaaaactaaactctaatttttttatcccaatcaggatcgaaaaaaaaaaaattatagaaaaaaaaactgtctaatactatagaaataatatttttttctattaatgaataaaaa

SEQ ID NO: 3548 - DNA, 400 bp, Lilium asiatic
  Clone ID: LIB3230-008-P1-K1-F7
aaaaatagttgctgttattggtggtggattaatgggttctggaatagctactggtctaattctaaataatatctccgtcgtactaaaagaaatcaattctgattatctacagaaaggcatgaaatctataacagcaaatcttgaaggcttagtgaagaaaggatcactgacacaggaaaagatggatgtggccttgtcccttcttaaaggtgtactagattactcggagttcaagcatgttgatatggttatagaggctgttatcgaaaagattccattgaaacagtcaatatttgttgacattgaaaaggcttgtcccccgcactgcattttggcaaccaacacatccactatcgatctaaatattattggagagaagacgaattctcaagaccgtatt

SEQ ID NO: 3549 - DNA, 410 bp, Lilium asiatic
  Clone ID: LIB3230-008-P1-K1-F9
cggacgcgtgggcgggaaatgataagtctcgcccagtagcagagcctaacgttccatctgccagttcgttcctctctttcatcaaaggagtgcttccaaagtactttaattcagaatggtccgtagcacagttccgattgcatgaaggatctcaatatatcgtcgcttttggtcatcaaaataacacaattgtggttctgggaatggatggaagtttttaccgatgcgaattcgatccggtggttggtggtgagatgaaacagctggaatgctacaatctcctgaaaccagaggaagcctcctaactgcccccaactttggcgcattccagagtctgctcataccactgttgtcactgtgacccacgggattttactttcattgtagatattcaagtgcggatgccttgc

SEQ ID NO: 3550 - DNA, 402 bp, Lilium asiatic
  Clone ID: LIB3230-008-P1-K1-G1
cggaagaagacaaaagttcacgattcaaataatgctgaaccattggtggatctgaatcgtgaaactgcagatagtccggaagaagacaaaagttcacaaaagaagaaaaaggtttaggaacaagagccaataagtagcggtgaggcgagtaagaccaggcagaaaattactaaaggtgacaagtctttcactccgaaaactcctacggaattgcgtcaaaagaatgagactgatgaagattacagtccatctccagtggaaacacaaagcgtggttaccaatggcttggaagcaggtaaacccggcccgaagaggaaaaaggaggcgacaactactaatgagggaccagcagctcttctgttgacatttgctcctgggataactctgccttccaaagagaaa

SEQ ID NO: 3551 - DNA, 412 bp, Lilium asiatic
  Clone ID: LIB3230-008-P1-K1-G10
ggaacactaagatggttctcgttcttgcactgtttcttggtggttgtgtgctgggactcgaagggttgaacattgaaggagaatcctgaggtctaccaccctcagaacttcttcggtttcggcggtgtcatcagtcctttttctggctctagctttggcccggggttcgggtttcgaggtgccggcaacgtcccggcggctccggcaggaggaattattgttggaggcaaaactgtgaagcgataatctggtcggttgttttcagaagtgatgtaagggagttgagtgctagtacagttattggggtgcagtgcgtttttacgttaagtttagttccaagactcgatttattggtgatacaaggttcagtgtgtgtttcaactgctgtagtgtttttcctagacctttagcc

SEQ ID NO: 3552 - DNA, 96 bp, Lilium asiatic
  Clone ID: LIB3230-008-P1-K1-G11
gggggacctaaaacgaacgaaaaaataaaatagtaaaggtttttttaaaaaaaaaaagaaggaaaaagggggggaataaaaaaaatttgtgggggt

SEQ ID NO: 3553 - DNA, 433 bp, Lilium asiatic
  unsure (1)..(433): unsure at all n locations
  Clone ID: LIB3230-008-P1-K1-G2
gggcggccacgcgtccncggaagaagacaaaagttcacgattcatataatgctgaaccattggtggaacgtgatcgggaaactgcatattgggtggaagaagacaaaagcncacaaaagaagaaaaaggttaaggaacaagagccaataagtagcggagaggcaagtaagacgaggcagaaaattactaaaggtaacaagtcttccactccgaaaactcctacggaattgcgtcaaaagaatgagactgatgaagattacagtccatctccagtggaaacacaaagcgtggttaccaatggcttggaagcaggtaaacccagcccaaaaaggaaaaaggaggcgacaactactaatgagggaccagcaactcaactgaagacatatgctcctgggataactctgccatccaaagagaaccaagccactacgta

SEQ ID NO: 3554 - DNA, 416 bp, Lilium asiatic
  Clone ID: LIB3230-008-P1-K1-G4
gtcatcctcttgttcacgacgaatgatgttaataatcttgatacactagcaatgcatgtatggagcatgggcggcttccctgtatcttagtgggttttcaggccatactgaccgggatattttcttgatctttgagcaaggctggaaacaacgctatggttatatgccaaatatgatgggtgctagatgaattgaccgtaagaggagctggaactcctatggaattgctttgtgttttgatcaatggaagagtctaatatgcatacctgttgccatatccagtgctgttgggccccaagaacccgagttaccaacgtgcactctcgattcactgttctaagagccggatatctactcatatcagcagtagcaggctggcttgtccagtgtaaacatgtcaacagtgtacagatgag

SEQ ID NO: 3555 - DNA, 304 bp, Lilium asiatic
  Clone ID: LIB3230-008-P1-K1-G7
aaaaataaaacctaatctcggcaatttattaaaggcggctgcaatagctgcgcggggccaacctaaattatgctcgtgcacccacaaaaagaacaccaacacaaagtaaatacagaaacgcataacaactacaacatcaaatctagcaaccatagtcaacaaaagatcaccgacacaggaaaaaactgaaatcaccttgaccctaacaaactggggacaagaaagcccgtagaccaagcatagtgacatcagtagaaaaacagatactgaaaagactccaacaaaacagtccatatcaatttac

SEQ ID NO: 3556 - DNA, 407 bp, Lilium asiatic
  Clone ID: LIB3230-008-P1-K1-G9
attcgtactcataactcaagttgggttattctgaggaaatccttagatatttattgagccgtctctaacctcttttgtttgtctcgaatcaatttttattccgcattttgatccaattgttgagacaattgaaaatagtgtttccttgttccggaatcctttatctttgttttgtgaaatcattgggtttagacattacttcggtgatccttactcctttcaaaagggcagcaacataccttttgttttttttcttatttctttctatagactatagaaaaaaataagagagattgattcccttgtgatacacttttgatcgaaatagttttatgaattccgacaaatattacttattttcttttttatttcaaacttgtttgaattttaacccttttcaatttata

SEQ ID NO: 3557 - DNA, 394 bp, Lilium asiatic
  Clone ID: LIB3230-008-P1-K1-H1
cggcagaacacaaaatttcacgagttatttttctcttaaccaacgccggaccagggtgcgggaaactgcttattggctggacgaagacaaaaattcacaaaccaacaacaaggttgatgcacatgagccaacaactcgcggcgaggcatgcaagaccacgcagaaaaataccaaaggtaacaagacttccactcccaaaacacctacggaattgcgacacaagaatgagactgaggcagaaaacaacccatcttcagtggaaacacaaagcgtggttaccaatggcttgcaaacaggtaaacccggcccgaagaggaaaaaggaggcgacaactactaaatagggaccagcagctcttctgttgacatttgctcctgggataacaccgccttcc

SEQ ID NO: 3558 - DNA, 185 bp, Lilium asiatic
  unsure (1)..(185): unsure at all n locations
  Clone ID: LIB3230-008-P1-K1-H3
ntnactcttttccactcaactagcttttcgttttatctccctacatnacacacgggagggtaaaaaagttttatcttgcacccctcaccatactcaaactaaaattctcaactctcactcatcataaacacatccctcactaccagatacaacattctcgatatactcataaagtcctccccgcc

SEQ ID NO: 3559 - DNA, 374 bp, Lilium asiatic
  Clone ID: LIB3230-008-P1-K1-H4
cggacgcgtttgttcacgactaatgattttaataatctcgatacactatcaaaggatggatgcatgaggtgtgtttttggtttatattaatgggttttcaggccatactgaccgggatatttttttgatctttgagcaaggctggaaacaacgctatggggatatgccgaataaggtgggcgctgtatcaattgactgtaatatgacctgcgccaagctatagaatcgctttgtgttttaataaatggaaaagacttatatccatacttctttttgaagcgaagccctttgaaatgataagaacatgcatgcatgcatggatgtattcacttgagtgtacgtggagtttattttaagctctgagcgagtttata

SEQ ID NO: 3560 - DNA, 234 bp, Lilium asiatic
  Clone ID: LIB3230-008-P1-K1-H7
aaaaatagaagctgatatcggttgttttttaatggcagctggaaacaccaggggggtaatactaaattttatctgaccccaacaaaaagaaatcacttcttaattatctacaaaacggcatcaaatctacaacatcaaacattgcaagcttagcgaaaaaaggatcactgacacagccaaaaattgatgttatcttgcccccacttaaatgtacactatataacacaaaggtca

SEQ ID NO: 3561 - DNA, 386 bp, Lilium asiatic
  Clone ID: LIB3230-008-P1-K1-H8
cccacgcgtccgcggacgcgtgggtggttctgctagttacagcgatacagagcagcttcggcgatcgtttgcgagatctctctcagatcgagagctcggagactttcaatatgaggaaagaaattatagacatgtctacagatgaagaatcagactgtgtggttatttgttcggccggtattggccccaagcaaggaaatggccttgcttccaagatttctcaatcttctggatctgatgaagttatagaaggtgtatctgattctcaatacttacatcgaacaatataatctgaagattatcaagtcaagtacaacaccaccttggatggtcctgtcaggactcattgatcttcggagacgataaaaaaccttctatttatgact

SEQ ID NO: 3562 - DNA, 409 bp, Lilium asiatic
  Clone ID: LIB3230-008-P1-K1-H9
cccacgcgtccgcggacgcgtgggtgtgttctgctagttacagcgatacagagcagcttcggcgatcgccggcgagatctctctcagatcgagagctcggagactttcaatatgaggaaagaaattatagacatgtctacagatgaagaatcagactgtgtggttatttgttcggccggtattggccccaagcaaggaaatggccatgcttccaagatttctcaatcttctggatctgatgaagttatagaaggtgtatctgattctcaatacttacatcgaacaatagaatctgaagattatcaagtcaagtacaacaccaccttggatggtcctgtcaaggactcattgttcttcggagacgaagaagaacctcctatcaatgacttgaatttaggtgctgaaaaac

SEQ ID NO: 3563 - DNA, 245 bp, Lilium asiatic
  Clone ID: LIB3230-009-P1-K1-A11
ccttatccttctcactcattcaatatacctatagctattactcctcgtatatgatgaacatgcttacacatgcactattgaattacactattccttaatcgtacattattataaatcatgccacacacaagcacatcaattcttatacatatgctctcaaacatatcatattatcaaattgtgagcaatagtcattactcttcttcattatcatttaacttatgaagctttgttatataattaca

SEQ ID NO: 3564 - DNA, 66 bp, Lilium asiatic
  Clone ID: LIB3230-009-P1-K1-A12
cccacgcacaactgctgcaacattacattgactacttacctaccgacgaggtggagggtgccacaa

SEQ ID NO: 3565 - DNA, 52 bp, Lilium asiatic
  Clone ID: LIB3230-009-P1-K1-A2
cggacgcgtgggtacaaacctcacagtttttatgaaacaataagaccaccac

SEQ ID NO: 3566 - DNA, 223 bp, Lilium asiatic
  Clone ID: LIB3230-009-P1-K1-A3
cggacgcgtgggtgcggtcctcgcggtttttatgggacaattgatgtccaccttgattgtgagaccagaattgcaaagttcatggggacccctgattctatactctactcttatgggatttcttactattttaagtgttattccagccttttgcaggaaaggcaatatcattgtcgccgacgaaggagttcactggggagttcaaaatggccttatttttttt

SEQ ID NO: 3567 - DNA, 350 bp, Lilium asiatic
  Clone ID: LIB3230-009-P1-K1-A4
accggctcagcttcggcaaattgggctacggctgcaagcactatcggcggcgatgcatgatccgagcaccctgctgcaacgagatctaccactgccgtcactgccacaacgacctcagcgactgccacgacctccgccgctcggacgtccaacacgtgatttgtgcggtatgcgacaccgaacaaccggttgcgcaagtgtgcacgaactgcggtgttagcatgggggagtacttttgcgaggtttgcaagttcttcgatgatgatgaatcaaaagggcaatttcactgcaatgagtgcggaatttgcagggttggaggcagggagaacttttttcattgccaaaaatgc

SEQ ID NO: 3568 - DNA, 375 bp, Lilium asiatic
  Clone ID: LIB3230-009-P1-K1-A5
cggacgcgtgggcaatgaagttacaaaattatattaaaaatcaatttgttatttgatgcttcaaatgttgcaatggatattggacttctttcagttatgcagtaatcacatgttactgtgcttggtaactgatatgtttttttaaataagattggcaacaatggcatctgaaaggttattgattctccaacctcataactgggttctggaggagagatcatggcatgcttttgtattacaacaggtaagtccatattttcatctgtttcttattgcttttacagccgtccattctgatgtgttgtgcttaggagctacggagaagctgtccaagaactgagtatttgcatggcgtttgcgcctgcagaggaagcg

SEQ ID NO: 3569 - DNA, 395 bp, Lilium asiatic
  Clone ID: LIB3230-009-P1-K1-A6
gcaaggtttctaaacctaatacaaaggagaaagctgcatcatctaagaaggcttcggctaagattgctaaaaccaagtcaaattcttctccaactaagaattctgttgatgtcagtgcttgtgatccacctttgccctcaaaatccaagaaagagagtaaaaagaaagaaccgagtagtgagaactctgcacccggagacactaagcttgtcaagaagccggcctccaagaatgcaacgcaggattcaactaaggaacaaggaaaagataaggctagtggcaaagccaatgctggtccaagcaaggaggagctgcattctgtaatcagcaatatactgaaagaagtggatgtgaatactgcaactttggcagacctcatcggtaaatcaagggct

SEQ ID NO: 3570 - DNA, 384 bp, Lilium asiatic
  Clone ID: LIB3230-009-P1-K1-A7
gttgggagatgtcattattgctgaaccaaatgcctacattgcatttgcgggtaaaagagtaattgaacaaacattgaataaaacagtacccgatggttcacaagcggctgagtatttattccataagggcttattcgacctaatcgtaccacgtaatcttttaaggggtgttctgagtgagttatttcagctccacggtttctttcctctgaatcaaaattcaatatattaaagtatagcactcgattcaattcaattatttgtagcgaacgagtatttagttcatcgtaaaaaaaaaacttaagttaagaagagtggtgttttctttggtgacataagtttcacttgtagtaagagccggaagtttcggattattattatttt

SEQ ID NO: 3571 - DNA, 191 bp, Lilium asiatic
  Clone ID: LIB3230-009-P1-K1-A9
gagttcaaaatgggctttatctctctagaagtactgttgcttatttcaagcacaatgatatgacatcactggagaacaccttggaaaaattgaccaaaggaaataaacgtgcagaaaaagtacggcggtatattgttgttgaagctttaaaccaaaattcaggtcaaatagcccctttggaagaaagagcc

SEQ ID NO: 3572 - DNA, 295 bp, Lilium asiatic
  Clone ID: LIB3230-009-P1-K1-B1
cggacgcgtgggtgccgatattcgtgaaggatcatatgagatcataagcaatacggaagcggatgtgcctattcatacttccaattccacagagccgaggacaactgaaactccgccaggcacaagcagtcgtggcaaaaaaagttgttcatactcccaattccaccgagccgaggacaactgaaaccccgtcaggcctgaggagcagtcgtcgcaagaaagctgttcatgatcccacttacaccgagccgaaaaacaactggaacccccgcaggcccaaaaaagcagtcgtggt

SEQ ID NO: 3573 - DNA, 401 bp, Lilium asiatic
  Clone ID: LIB3230-009-P1-K1-B10
caaaaatgcgccaccaaaaacacaattacattgccgtactgataagtctggcctcatcggtggaactccttggatacaaattccaatatccttttaaaggggaccaccattatttgatgccggtgaagcttttgcaatgatgattgccttatttgttgctcttgtggagtccacgggtactttcattgctgtttcaagatatgccagtgcgacaccattgccttcttctattctcaatcgcggtattggttggcagggaatgggtatattgatagatggattatttggtacgctaagtggttcctcagtgtcagttgaaaatgctggtttgctagccttgacacgtgttggtagcaagagagtcgtacagatagctgcgggaatcatgattttcttttcta

SEQ ID NO: 3574 - DNA, 254 bp, Lilium asiatic
  Clone ID: LIB3230-009-P1-K1-B12
gagtagataaaaaaacataagattacatttcaaatattaaaaccaaagcgtgaggcatatcacaatttttgaccggtaccaaataagaatccataactaactcatattatgataaagaaacgaaaaaaaacaaaagtataataggaaggaggcaaaacatccacatacaagatatgattaataaaatgatccatcaattacatttataaatatctcttatgcaagaatcctacatttataataactcctaatat

SEQ ID NO: 3575 - DNA, 344 bp, Lilium asiatic
  Clone ID: LIB3230-009-P1-K1-B5
cggacgcgtggggatgtggaaaaggaagcgtgaacatgaagaacagtgggaaggaacaagagaaaatcgggttttcagttggagagattttatgaaaacagggaagaagggaaagaaaggagagataaagcctccgaagctcaaaacagaagatccaaacaaatcttatgtgcagaggccggtaaagcggggttgaaactggatagtgttgggggttgcacttagaatcactcagaatcggatgatcagcctgtttcacaaatactcgtgttagaaaaaatctttttattggagagaatgatgatggtatgtcttgatgaagagctatatttttgtactataaa

SEQ ID NO: 3576 - DNA, 389 bp, Lilium asiatic
  Clone ID: LIB3230-009-P1-K1-B8
acgtggttcacgagaaatcgaggaaaccttgctgaaacacctgggagtgaagcgcaatgaagtgaccaaggacggcttattctctgttggagaaatggagtgcatgggatgctgtgtaaatgctccaatgatcactgtggctgattacaccaagggttcagaaggatatacatacaactattatgaagatgttactcccgaacgagtgattgagattgttgaaatgctgaagaatggagaagccccacctgttggcacacaaaacccaaaccggataaaggggggaccggctggtgggaacaccactctgctcggggagccgaagccttccccatgcagggatcttgatgcctgctaatacttttgcgagccgagtgtctaataattag

SEQ ID NO: 3577 - DNA, 408 bp, Lilium asiatic
  Clone ID: LIB3230-009-P1-K1-B9
cttaagttgccaagacagcaggaagttgtcacagatactgcaccaaacctgtcgtccaatgccccgcctattgtcgaagctcctaaggagaccgatgcggtatcaaattgcagcgagagaagatgtgttgtaaagatcaagcttaaacagcctgcgtcttccagtaaagtagatgatgccgaacgtgtggagcattctcgaggtagacagaaatcaaccccctgcaattctctgtcagtagatgctccaatcaggggaggtcgtgagacgtttaacagcagtaaccaaatcattgatgaggggaactcctctcatgaccatggatcacgaatgaccgtcagcgtgagcaataggaagtttgtgggcagaaatgaggtccgcaaggacttgcaatgtactgctgattca

SEQ ID NO: 3578 - DNA, 258 bp, Lilium asiatic
  unsure (1)..(258): unsure at all n locations
  Clone ID: LIB3230-009-P1-K1-C10
gtggataaaaaaacgtaagatctcatttcaaatattaaaaccaaanncggggaggatatcacaatatttttctcgagaccaaataaaaatccataacttattcatattatgataatgaaatgaaaagaaacaaaagtataataagaaggaggcaaaacatccacatacaataagtgattaataaaatgatcgatcaattacatttataagtatctcttttgcaagaatcccatatttataataagtcctaatatcaaa

SEQ ID NO: 3579 - DNA, 401 bp, Lilium asiatic
  Clone ID: LIB3230-009-P1-K1-C11
ccagtttgatcatccatggagtccattcgcaagcaggcaagcaagttcagggaccacgttgccaaacagcagcaggatattcttaagcaatttagtgggcgtttcagtcatgattctcccctttctgaagatgttgaatttcaatgcaatgaaaaacttcaaaagctttataactctaccagagctgcaaagcgtttccagcgggatattgtgcggggtgtgggaggtttagtttctgcaaatctgaagcagaaggaaattgtgaccaagctagctgaagattgttccaaatacggaaatgaacatgagaattctggtttccctcttgcaagggcttctcgggagtttggtacgtctcaccatttaatggagaaggagagagaagttcttcttcatatatt

SEQ ID NO: 3580 - DNA, 403 bp, Lilium asiatic
  Clone ID: LIB3230-009-P1-K1-C4
tgttagtggataaaaaaatgtaagatcacatctcaaatattaaaaccaaagtttgagatcatatcacaatacaagaccaataccaaataagaatccataactaattcatattatgataatgaaatgaaaagaaacaaaagtataataggaaggaggcaaaacatccacatacaagatgtgattaataaaatgatcgatcaattacatttataagtatctcttttgcaagaatccgatatttataattagtcctaatatcgaactgttgtttacttggggatgcaagaatcctatgggctatagaatacttggacgagccagagccaatgatcgataaagcctctctagttgattatactaatgttattgtgccattgatgaaatactgtatgaagcataaacg

SEQ ID NO: 3581 - DNA, 391 bp, Lilium asiatic
  Clone ID: LIB3230-009-P1-K1-C5
cccacgcgtccgctcggctcgacacggcgatgaggcatggacatggaacgcgcgctatggtcacctgaacttcgactcgctgcaaaagatcgcgcaacgcgggatggtgcggagccagccacatcttgatcacgtcgatcatgtttgtgacggtcgcctcatcgagaagcagcggcgcactccgttcctaatgatgacgccgtaccgcgcacaacacccgctcgacctcgtccacgacgacctctacggcccgatctcaccaccgggagattcagagccaacatgatgagtttgaggcaaaattcttcgaggaaagagcagcacttgaagccaaataccagaagttttatgaacctttatacaccaagcgatgtgaaattgtgaatggtgt

SEQ ID NO: 3582 - DNA, 412 bp, Lilium asiatic
  Clone ID: LIB3230-009-P1-K1-C6
ggggtcaccaaggggtaccggtacaagatgaggttcgtatatgctcattttccgatcaatgcgtcgattactaacgggaacacggcgattgagatcaggaatttcctcggcgagaagaaggtgcggaaggtggatatgcttgatggagtaacagttctgaggtctgagaaggtgaaggatgagctggtcctagatggcaatgatattgagcttgtgtctcggtctgctgctcttattaaccagaagtgccatgtgaagaaaaaggacatcaggaagttcttggatggcatttacgtgagtgagaaaggaaccatgtctgaagagtagtctcatcttttgtagcatgcaagggaatgtctcatcttttgtccttgtttgagaagaatcttatctggttagactaatttttatt

SEQ ID NO: 3583 - DNA, 413 bp, Lilium asiatic
  Clone ID: LIB3230-009-P1-K1-D1
gtgtcgcaaagactacttgtagaaataacattcaagcaaaagggtcaagcgccctgttgggacagaagctggagtgatcgggcctcatctcaaaagagtcattggtgaacaactgacaagcgaaaattgggccaagtaactgaaggtagaaatgaagtgagaatcgaagcatcacacatcatgtggaatgaatgaagcccgaatccaaaatccaaggagcagaggtacccgtagtagttagtacttgagatagatgctaatccagacatggtagccgaagaattagtagagttagtagataccagtcgaaacgcataaacaagatactcaagctgcttgttgactgagaccatgtccagaagaggcagagatggagccaacaatgccaaaaggagtagcaaaaagaaggcact

SEQ ID NO: 3584 - DNA, 99 bp, Lilium asiatic
  Clone ID: LIB3230-009-P1-K1-D11
aaaccgggggggcgtcctatcatttattgggtccaacctaataaccatggataataaggatgtttctgcctatataataaacctgggcctagtttatta

SEQ ID NO: 3585 - DNA, 374 bp, Lilium asiatic
  Clone ID: LIB3230-009-P1-K1-D2
ctccccgcagatgaagtctgaactctagttgtaagcggacccatcactacttgaagtccgtggatcactttaaactatgttcaacaactggagcaaggtctttctcttaaagtagttcaaacaacaggaaacctagcctatgacttaggtggatgtttagaccagggggcgctcagacgcgaatagacgaagaaaaaagatgtaaaggtctttattcgtctccaatctcaacttaaagttcactaaagtgaaagatgcgcactcttggttggctgcctatctcgatgggaatctaacctcgataactacggctatggcaaagcaaaaaaccttttttctgaactgatccgaaccaatgatggtgtataggatga

SEQ ID NO: 3586 - DNA, 290 bp, Lilium asiatic
  unsure (1)..(290): unsure at all n locations
  Clone ID: LIB3230-009-P1-K1-D3
acctttgctttcgatcctgnctgtaacattgattctcgttttagttcttctgtaatgcaacttttattttaatataaagtgtggntattctaaaaaaaaaaaaaaaaaataaaaaaaaaaaatntanattnnnannttntttaagaagtaaataaaataaaaaaaaaaaaggggtgcgacttaaaaaaaattaaaaaattaaaaagagttaaagttaatttaaaaaagggtttttctattaaaaaaaaaaaaaaattcgggccccgtgtaaaaaaaattttttttttttt

SEQ ID NO: 3587 - DNA, 370 bp, Lilium asiatic
  unsure (1)..(370): unsure at all n locations
  Clone ID: LIB3230-009-P1-K1-D4
ngntagtggataaaaaaatgtaagatttcatttcaaatattaaaaccaaaattggagaggatatcacaatttttgtaccgataccaaataagaatccataactaattcatattatgataatgaaatgaaaagaaacaaaagtataataggaaggaggcaaaacatccacatacaagatgcgattaataaaatgatcgatcaattacatttataagtatctcttttgcaagaatccgatatttataattagtcctaatatccaaactgttgttacttggggattcaaaaatcctatgggctataaaaatacttggacgagccaaatccaatgatcgattaaccctctttaaatgaatatactaatgttatt

SEQ ID NO: 3588 - DNA, 407 bp, Lilium asiatic
  Clone ID: LIB3230-009-P1-K1-D7
cggacgcgtgggtgggtccagatttagcagtgatatctgtactatgacatcagcatcacctgtttttgctaatgcaccagctgaaaaaggatttgccagctttgccatagattttctcatgggtggagtctctgctgctgtttccaaaactgctgctgctcctatcgagcgtgtgaagctactgatccagaatcaggatgagatgatcaagtctggtcgtctttctgagccctacaagggaattggggactgcttctctcgcacaataaaggatgaaggcgtcatggccttgtggaggggcaacactgcaaatgtcattcgttatttcccgactcaggctcttaactttgctttcaaggattacttcaagaggctcttcaacttcaagaaggacagagatggctact

SEQ ID NO: 3589 - DNA, 300 bp, Lilium asiatic
  Clone ID: LIB3230-009-P1-K1-D8
cggacgcgtgggcaggccgtgtatcatatgcccacaacagagaatgatacaccgactgatagcattcccttggctctgcagagcttgttctataagcttcagtacaaggacactagtgtcacgacgaaagagttgactagatcctttgggatgggacacaactaaatccttcatgcaacatgatgtgcaagaactcaatagggttttttgtgaaaagttggaggataagatgaagacatctgttgtcgaaggtatgatacaaaaggtatttgaagggcaccatatgaacttcattgagtg

SEQ ID NO: 3590 - DNA, 250 bp, Lilium asiatic
  Clone ID: LIB3230-009-P1-K1-D9
ctgacgcgccggagagaacattttcgtttattggaaccatacgccggggagaagggttatagatttattttggcagaggcattcaaaccactgaggactataggttctatgcaatcttgggttgagttccctgggttcagcaacaaagataagactcttgtgttccagttctctgttaagcacgaacagaagctcgactgtggtggtggattacatgaagctgctcagtggtgatgtagatcaaaataca

SEQ ID NO: 3591 - DNA, 400 bp, Lilium asiatic
  Clone ID: LIB3230-009-P1-K1-E11
cggacgcgtgggtccaattatgatttactctctggtgcctgtggaatcgattagtcgttctatcattcattgtattcgagcttattaccatggattatgaggatgtttcttgctatattatttagctggtgctagttttattatgttgagttgttgctaaccatggcagcgcctctgcgctcacgttgctttgcgcctcctgttcataacttgtgctatgcatttggagcttcatattataatttgacccttttatgcattgttggaattcatttgagatttgttatttatctctgtacctcgattctgttgctgcgcaatgttgaagttcctaactatggctttatgctttatatgctttatgctttatgctttaagttgaaggttataccttggaaat

SEQ ID NO: 3592 - DNA, 294 bp, Lilium asiatic
  Clone ID: LIB3230-009-P1-K1-E3
gactggtcgtattttgcattgtgtgacccaccaaggtgcacaaggccccatacatgctgtcttaagtgagaactgggttgtttatcactacttcaatctcagagcacatagatacgaaatgtcagttgttgaaatctacgatcagtcacgggcggataacaaagatgtttggaagcttatactcggtaaacataatttgacgtcgcccatttcttcgtattctcgtccggaggtggtagtaaaatcccagtcatacttttttacccattccgtgaaagcaatggcagtgacagc

SEQ ID NO: 3593 - DNA, 409 bp, Lilium asiatic
  Clone ID: LIB3230-009-P1-K1-E4
cccacgcgtccgtgctgacctgtgcttcatagatgtatcactgtaacctcaagaatttgacagtttgtcgaaacttgttcatcatactttctaatttttagcatagttattaatggaaaatgcttttgaactctggtctttattttttgtttaagcctttactttttggtgttctacatttcttaggagagattcctgctccaacagaagtttcaatgaagaaactgataaatatcattcttattcttatgagtagaagggtatggtgcacgtgacttgacgcataatcaacattggaaatgacacacatttatgacaaataatgtaacctgccattattacagatactgattacattgctgacaccagatagttgagaatatcatgagatgaggcggtatgatgcacg

SEQ ID NO: 3594 - DNA, 211 bp, Lilium asiatic
  Clone ID: LIB3230-009-P1-K1-E6
tgatcttccctatcaggaaagcgaggttgccaatatcaaagagcggagaatatagcactccaacatgtgggtttcagacttgagtgagatgtctgagtttttgtaaggaagtgatattgatattgtgtagtttggccatgaatttttttttctgaacatttattttctaataagataatatgaatgtgtccagagccagtttggcaacctt

SEQ ID NO: 3595 - DNA, 383 bp, Lilium asiatic
  Clone ID: LIB3230-009-P1-K1-E7
aaaagtgaatccatcatcaactcagagcatatctgatgaatgtggcgtgtatccaatctcctcaaaccgtagtgatttaacggtggcatcaagttctacagaggcttcatcctccttagcaagtaatgcactgaccctttctgattcttcattcccagtcaagactaccatggatgagcaagatatgattgacctcatgagcctcactttgtcatcaaactcaacaccacgtctaacacctcctgcaccacagccctctatattgaatatgaatgaacctccagtctcggtctcccccaacggacattggtacactaaccctcattcgcacatactaaaccaagggtacaattcctataacagttatgttgctccctgggctc

SEQ ID NO: 3596 - DNA, 281 bp, Lilium asiatic
  Clone ID: LIB3230-009-P1-K1-E8
tcgacccacgcgaccgaaaatcaatccatcatcaactatatcaatctgatgaaacaaacacgggagggtcaaagtaacttttttagtcaacacaaacacaagttctacaaaggcaccatacttcttaacaagtaacgcactgaccctatctgataaaacattaccagtctagactaccacgaataaccaaaatacacatacctcataagcctcacttagtaataaactcaacaccacgtttaaaacatactacaccacagtcttctaaatataatataaaa

SEQ ID NO: 3597 - DNA, 336 bp, Lilium asiatic
  Clone ID: LIB3230-009-P1-K1-F1
cggacgcgtgggcggagaagcaagccaaattggatgaaatatttgagaagcaaaagcagagggaaagagagttggaagagaaagataggctgagaagagaagctctattggcgaagaccttggagccacctaggccagctgaacctggtagtcctgttcgtcctgagcctgcacctgctgctaccgctgggaagtatgttccaagacaccgtcggcttgccgaggctggtcaggcccctagtgctgctgctcctcttggccagagtacgcgtgctccttctgctgccactcctgatacagatcgctggaccaggcgtgatgttcctgatactgatc

SEQ ID NO: 3598 - DNA, 321 bp, Lilium asiatic
  Clone ID: LIB3230-009-P1-K1-F10
gatccaaagcatcaccaatccgtttattttccacctggctcacctcaacggggtgaggaggaccaacgttgttagggacaacgaaaccaaacgcatgctgaatatctatctggagaacgacatccgcgataccgtgacctacactgagcacactctgcgcatgactgtgacagctaaagatatggagaatgcactcaagcgccaagaccgtaccctctatggctaagggggatgatcaaatactgatctcttctggaattggcggtctataactgattagggttgtttcaaatacctcatattaaaagaaaccacgcactg

SEQ ID NO: 3599 - DNA, 320 bp, Lilium asiatic
  Clone ID: LIB3230-009-P1-K1-F11
cggactcgtgggtccaattattatttactctctggtgcctgtggaatcggggggggcgcctatcattttttgtgttccaacttatcaccatggattatgaggatgattcttgctatattatttagctggtgctagttttattatattgagttgttgctaaccatggcaccgcctctgtgctcacgttgctttgcgcctcctgttcataacttgcgctatgcatttggagcttcatatcataatttgacccttttatgcattgttgaaattcattttagatttgtatttatctgtctacctcaattctgttgctgcgcaaa

SEQ ID NO: 3600 - DNA, 410 bp, Lilium asiatic
  Clone ID: LIB3230-009-P1-K1-F12
ggcgctgatgcacccggaggatctgtacgtgctggtgaagatgaagagggcggcggcgcaggtggagaagcagatcccgtcggatccccactgggccttctgctataccatgctccagaaggtctcccgcagcttcgccttcgtcatccagcagctcggcaccgatctccgcaatgctgtctgcgttttctatctggttctcagagcccttgatactgttgaggatgatacaagcataccggaggatattaaagtgccaattctggcatcttttcatcgtcacatatataatcctgactggcatttctcatgtggtaccaaggattacaaggttctgatggataacttccgtaacatttcaactgctttcttggagcttgataaaagttatcaagagggcattgaagata

SEQ ID NO: 3601 - DNA, 382 bp, Lilium asiatic
  Clone ID: LIB3230-009-P1-K1-F2
ttgctctgtattgcaggtggaatccagctggtgcaggtgctgtatcaggagacactgccgactgcccttctatctgaaagggaaattaagcagggtagtgcagggcttgcgagcaacattctggagggatatgcaatggcatatatgctgattttatctggatcttttgtgtggggaattgggaacacctcgccagcctacacgtcagttttctcatcaaggcgggcccgggtgatggggatgcacatggattttgtggcgggggtagtagacggaaatgtattacttgggtgtgatccagcaacttggaaggcttatgtctcgtgcttagttggcttgcttgtgagctatgttccaacctggctgacagaggtcaaacaag

SEQ ID NO: 3602 - DNA, 292 bp, Lilium asiatic
  unsure (1)..(292): unsure at all n locations
  Clone ID: LIB3230-009-P1-K1-F5
cggacgcgtgggctttgtgaaaaccctgaccgggaaagacgatcacgctcgaggtcgagagcagcgacaccatcgataatgtcaaggcgaaaatccaggacaaggaagggattccgcctgatcagcagcgtctgatctttgctgggaagcagctggaggatgggcggacgctggcggattataatatncagaaagagtcgacgctgcatcttgtgctgaggttgaggggtgggattatcgagccttttctgatggcgctggcgaggaagtataatcaggagaagatgatctg

SEQ ID NO: 3603 - DNA, 412 bp, Lilium asiatic
  Clone ID: LIB3230-009-P1-K1-F6
ggccaaaatagaaaccgcaacgtgaaaaatttgtgtgaaaatagtcttgtatatcctgctcctcacttcaccacccctaactctaattcaagtttttataattcttatttgagatatttagatttttgaatcttacggagtcccaagaagtgtttttgctctgcagtagcctataacaagtggtacattttgtggaaatgttagatcgtaatgaaactttatatagttaggtcccaaatatcattccaagttttttctccttggtgttaaatattcaaagtcttggaggattaagtaatttctaagagttactgcaaagttaaatctggttcggagaataaaatgatttctgacgtaaggtagtccgtcagagagaatttttaaaattcagtctgacctgtaaatctcttga

SEQ ID NO: 3604 - DNA, 222 bp, Lilium asiatic
  unsure (1)..(222): unsure at all n locations
  Clone ID: LIB3230-009-P1-K1-F7
aacactaattcaatcatcaattcttatcatacttgagaaaaaaaacaggtgtgggttccacgttaatttttttgacctaacnncaacacaaagttctacatagtctacaaccctcttaacaatttatgaactttcccttttccaaactaaatttctagtcaacactacccttaaaacacaagaaacaattaacctaaagatcataaccttaacaacaaacta

SEQ ID NO: 3605 - DNA, 200 bp, Lilium asiatic
  Clone ID: LIB3230-009-P1-K1-F9
attctaactgcagtatatttaccttcaaaagtaaaatttcagctcagtgtggaaccaaatcatggtaatgtttctaattattagggttactgggctatatttttcgtatggaaattttattagtactgggtggtttggattaaaagtacatttatttattacattaattggatttttctattctaaaattaataatggcc

SEQ ID NO: 3606 - DNA, 353 bp, Lilium asiatic
  Clone ID: LIB3230-009-P1-K1-G1
gtggaagtcgccatatggtgagcccagcatccgcctccgcatctggggtggctgcagccggaagctcttggcggcagacgggacaggagttgcggagcgagagccagggaaggatgcagtcctggtggtaaacgtgcttgcacggcatctcccgtccggcggcgccaggctcaaaggcctcctggcacacggcacagtgagcaccacctccggccaccgtcaccgatggcatggactccaccgcagccttcgacgccggtggacgcggagccgcggcctccaaccgcgagaactggtcgagcaggcggtggaaaccggaccccatgaggaggtgctggacgtcaccgggcagc

SEQ ID NO: 3607 - DNA, 329 bp, Lilium asiatic
  Clone ID: LIB3230-009-P1-K1-G10
atccagggcatcaccaagccggccatccgccgcctggctcgccggggcggagtgaagaggatcaacgaccttatctacgaggagaccagaggcatgctgaagatctttctggagaacgtcatccgcgattccgtgacctacactgagcacgcgcggcgcaagacggtgacggcgatggatgtggtgtatgctctcaagcgccagggccgcaccctctatggcttcgggggttgatctagtactgttctcttctgggtttggtggtctatatctgatttgggttgtttcatatttctgatatgaaatgaaatctcgtcttgaatagtttc

SEQ ID NO: 3608 - DNA, 329 bp, Lilium asiatic
  unsure (1)..(329): unsure at all n locations
  Clone ID: LIB3230-009-P1-K1-G11
atccaaggcattaccaagccggtcatcctacgcctggctccccgcgacgggggggagaggatcaacgttcttatggacnaagagaccagacgcatgctgaagatcttcctggataacgtaatactcgattccgtgacctacactgatcacgcgcggttcaagacggtgacggccatggatgtggcgtatgctctcaagcgccagagccgcaccctctatggctgagggcgttgatctagatctgtgctcttctggagctgagtgtctatatctgatttgcgtcggatcatatcactgatatcaaaagaaatctagtcttgaatagtctc

SEQ ID NO: 3609 - DNA, 413 bp, Lilium asiatic
  Clone ID: LIB3230-009-P1-K1-G2
gtttctctttccgcctcgccgccggcagccgcttccagatccgccacaatgactgctcaaacccaggaggagctcctcgccgccgctcttgagcagcagaagatcgatccggatgagcctgtggttgaagatgaggatgacgacgatgaagatgacgaagaagatgacgacaaagatgaggatgatgcagaaggaggtgatggcagtggaaggtcaaagcagagcagaagtgagaagaagagtcggaaggctatgttgaaacttggaatgaaacccatactcggtgtcagccgtgtcacagtaaagaagagcaaaaatatactgtttgtcatttcgaaaccggatgttttcaagagcccgaattcagacacatatgttgtctttggtgaggctaagattgaagatctgagctt

SEQ ID NO: 3610 - DNA, 371 bp, Lilium asiatic
  Clone ID: LIB3230-009-P1-K1-G3
ggacgcgtgggtgcccagaaaatcatactcttcagtatttttggaggctatgcgagcaacagtttaacatttcagacgagactgaagatgaagatgcaaatgaagaatatattgaagagacaaatagggacgcagttatgattgcagctgcaaaattggtggctagtggcactgttcctaaggattatcttggtccagaaatcatttcacattttgttatgcatggagcaagcattgctgaaataatcaagcacctgattacccttcttaagaaaactgcaagcgatgatattcctgtgatgtttctggaggcattaaaacgggcttacagacggcatgtggtggaacttacaaaaagtcatgatgatttc

SEQ ID NO: 3611 - DNA, 395 bp, Lilium asiatic
  Clone ID: LIB3230-009-P1-K1-G4
ccttgaacaattgataaagaatgagcctactgtggcgatgtcctcagtgcagttaatttggctgtatacaatcatgttgtctgctactgtggtgaaattagctctctggctttattgtagaacatcaggaaacaagattgttcgtgcctatgctaaggatcattactttgacgttgtaactaacgttgtgggcttggctgctgctgttcttggtgataaattctattggtggatagaccctgctggggccattatccttgcaatctatacaatttcaaattggtctggaaccgtatgggaaaatgcagtgtcactggttggtcagtctgctcctccggaaatgttacagaaactgacataccttgtcatacggcatgatcctcaaatcaaacatg

SEQ ID NO: 3612 - DNA, 320 bp, Lilium asiatic
  Clone ID: LIB3230-009-P1-K1-G6
gcttccgggccaaaataaaaaccgcaacctgaattatttttttgaaaacatcccccaacaggctggtgcctcactttattttccctgactctaaaacaagtgtctataatttttattacaaatatacagattgttgaatcttactgattcccaaaaatggtttttgctctgcagtaacctataacaagatgcacattttatgaaaatgtcagatcttgatgaaacttattctatttagctccaaaatctcactccaaattttttctccttggtatcaaatactcaaagccttggaggatctaattatttataagagttac

SEQ ID NO: 3613 - DNA, 407 bp, Lilium asiatic
  Clone ID: LIB3230-009-P1-K1-G7
agaagcctcactactctggaatcacgatctgtggcgtgggatgaggctgagcgggcgaagtatatgtgttggttaccggccagaagaagtgaagatacaagcctgggaaaatcatgagaaaagaaaagccgaaatggagatgaagaggatagaggtgaaggctgagagactgatataactgactcaagaaaaactgtcaaacaaattagcatcaacacggagaatcgcagaggagaagcgagctaatgccgaagccaaactgaatgagcatgcagcaaaaaccactgagaaagcagaatacattagaagaactggtcacttaccatcttcatttctcaccttcaagatgccttctttttgtagtgaaataataatccagccttttgtaatatagactaataatttga

SEQ ID NO: 3614 - DNA, 398 bp, Lilium asiatic
  Clone ID: LIB3230-009-P1-K1-G9
gtagacccttttgggcacgaacggaatcaggaatttttcgttctgtattgagagccgatcctaactttgctgattctccttggccaacagtatcttcagaagctaaagattttgtgagaaggcttctgaataaggactacaggaaaagaatgactgctgcacaggctctaactcacccatggttgcgtaatgagcagcagcaggtccctttagatatattagtgtataagttagtgaaaacataccttcgtgccactcccttcaaacgagcagcattgaaggctctgtctaaagctcttacagaggatgagctcgtgtatataaggtcacagtttgcgttattagaaccaaatagagatgcacgcatatcctttgaaaatttccggatggcccttctg

SEQ ID NO: 3615 - DNA, 413 bp, Lilium asiatic
  Clone ID: LIB3230-009-P1-K1-H10
ccgaaaccctagcagccgctccgattcccattcccgagatccagatcactgcagcacagtgagaatgagcggggtgaagaaggcggtggagacggtggctaaggctacgaagtcggcgatcgactgggacgggatggggaagctcatggtctccgatgaggcccgcagggagttcgccaacctccgccgcgctttcaacgaggtcaaccagcagctccagaccaaattcagccaggaacccgagcccatcgactgggagtattacaggaaggggattgggcctcgtttggttgatatgtacaaagaagctttcgagagtatacagatcccgaaatatgttgacactgtgacccctgagtacaagcccaaattcgatgctctgttggtggaactgaaagaagccgagcaattgt

SEQ ID NO: 3616 - DNA, 412 bp, Lilium asiatic
  Clone ID: LIB3230-009-P1-K1-H11
gtgagacttctgaagctaaaactagaagttatctcactgatgcccccaagggcctctctccaatggatgttagagggaagattgacaaggataaagtgaaggcagctctcgagaaacgtagaaaatctcgaggtgaggtggacaggaagatggatattatggatgatgatgacctcattgagagggagcttgaaagtggaattgaaatggctgccgaggatgagacgaccaagcaagagatgtatggcgagcatgaacagcattggcaggagcatcagaacccagatcgtgttaacgaggattgggaccatgggaccgatattgtgaatgctgaagaaggtgagctctcgctggagccccatgggtaccatttttcagagcctaccggtaggaagagaaaaacacttagccc

SEQ ID NO: 3617 - DNA, 151 bp, Lilium asiatic
  Clone ID: LIB3230-009-P1-K1-H12
tactcattcgtcgacgcccgttctagaggatccaattttacttacgcctgcatgcgacggggtggctcttctatagtttttcctagatacaattcactggcccgagttttacaacgtctagactaacaaaacccatgtgaactcaacttaa

SEQ ID NO: 3618 - DNA, 347 bp, Lilium asiatic
  Clone ID: LIB3230-009-P1-K1-H2
gcaccagcggcggcggcggcgatggcatcagcagcatcaacggcggcggtccccttctggcgttcggcggggctgacgtacatctcctactccaacatctgcgcctccctcgtccgcaactgcctcaaggagcccttcaaggccgaggcgctcacgcgcgagaaggttcacttcgccatctccaaatgggacggcggaaagcccgagaaggccgtcactcgcagcgatacaggtgaagcatgagggctcaaggcacttcaggtaatctaggcttttttctgacgtgtccgtctatgttaaggcaattgggcatgtggtaataatgttttgttacactcaaaaacttt

SEQ ID NO: 3619 - DNA, 212 bp, Lilium asiatic
  Clone ID: LIB3230-009-P1-K1-H3
accaaagtaagtgtatattgtcctttagcttgtctgtaagtcaatctcgagcaacaaaccgtacaaattggagttatctatcctattagacactttgatatctcaagagacttatttcttcgaactgtctcaaacaatcaactactgtataagggtgttatcaagattttatagagccctgaatttaatataatgacttgcatcctctaaaa

SEQ ID NO: 3620 - DNA, 280 bp, Lilium asiatic
  Clone ID: LIB3230-009-P1-K1-H5
ccaagcgccaccggaaggtgctccttttcttcatccagggcatcaccaaaccgggcgtgcccaactttttttgttgggcaaaatgaaaaggatcaacggccttatctacgaggaaaccctaagcgtgctgaaaatctttctcgaaaatgtcattcgctatgccgtgacctacaccgagcatgctctccgcaagactgtaacggtgacagatgtggtgtatgcactaaatgcacccagccacaccctctatagttttgggggttgaactaacactgttctt

SEQ ID NO: 3621 - DNA, 379 bp, Lilium asiatic
  Clone ID: LIB3230-009-P1-K1-H6
gccaagcgccaccggaaggtgctccgggacaacatccagggcatcaccaagcctgccatccgccgcctggctcgccggggcggagtgaagaggatcagcggcctcatctacgaggagacccgaggcgtgctgaaaatctttctcgaaaatgtcatccgcgatgccgtgacctacaccgagcatgcgcgccgcaagactgtgacggcgatggatgtggtgtatgctctcaagcgccagggccgcaccctctatggctttgggggttgatctagcactgttctctcttgggtctctggttgtttattttcgggttggatggtaagtctgttcttcatatttctcgtatgaaatgagatggaaatggaaatttgggttgtcg

SEQ ID NO: 3622 - DNA, 410 bp, Lilium asiatic
  Clone ID: LIB3230-009-P1-K1-H7
agaagcctcactactctggaatcacgagctgtggcgtgggatgaggctgaacgtgcgaagtatatggcaaggtaccggcgtgaagaagtgaagatacaagcctgggaaaatcatgagaaaagaaaagccgaaatggagatgaagaggatagaggtgaaggctgagagactgaaatcacgggctcaagaaaaactgccaaacaaattagcatcaacacggaaaatcgcaaaggaaaagcaagctattgccaaacccaaactgaatgagcatgcagcaaaaaccactgagaaagcagaatacattagaagaactggtcacttaccatcttcatttctcaccttcaagatgccttctttctgtagttaaataataatccagcctcttgtaatattagactaatattttgagtt

SEQ ID NO: 3623 - DNA, 401 bp, Lilium asiatic
  Clone ID: LIB3230-009-P1-K1-H8
agatagaacaataaaatcagaataacttactaactatttgttgaattctggtagtttttgagattgtattgaattaagtttaatgtgtatacctggttttgaatattagatttcactaaacatagctaataaataaacctctccatggtctttttggtttttatattaaaatacgcatgcatatttgcaaattaataacaaattttgagattatatgaattaaagctcttagaaatagattaaacttaatttgtgatactcggtcttgatttataatagtaaaataccctgttctaatagtgataatgctgatccttccccacaaaggtttatatggaagcaaattcacgaattatcatataactatccttgtgttatttcattggaagaaaagtcttata

SEQ ID NO: 3624 - DNA, 272 bp, Lilium asiatic
  Clone ID: LIB3230-009-P1-K1-H9
gaacgtcatccgtgacgccgtcacctacaccgagcacgcccgccggaagacggtcaccgctatggacgtcgtctatgcactgaaacgccagggacgcaccctctatgggtttggggggtaatctatctatctaaggttcaggggatcaagcttgaaaattaaatcaatctggtcttaatttaagaatggtaaagttggggtggaaaccttggtattttggacatggaaccggatttgatctttgtgagaatatgagctgtggctactgcgtt

SEQ ID NO: 3625 - DNA, 83 bp, Lilium asiatic
  unsure (1)..(83): unsure at all n locations
  Clone ID: LIB3230-010-P1-K1-A10
cgacccacacanccgcggaaaaaaaacctacatacaacaatcttaatgccccgaccaanccccccgcccgcacctataaaaac

SEQ ID NO: 3626 - DNA, 346 bp, Lilium asiatic
  Clone ID: LIB3230-010-P1-K1-A11
cgaacatcaggttgatcgagatgagcatgaatgatgcttggtttcgtgatgccggaccgacttttgttatgcttgataggaaatcaagttcaggaaacctagattatcaagttgctggcattgactggaatttcaatagctggggcggaccggaagaaggctggtatagtgattggagtctggaccttcatgttgccaagaagattgtggaagtggagaggcttcctagaattccacatcagatggtccttgagggcggaagcattcatgtagacggagaagggtcctgccttacaactgaaaaatgcttgctaaaaccttaatgcaacccttgttttacaaggga

SEQ ID NO: 3627 - DNA, 269 bp, Lilium asiatic
  Clone ID: LIB3230-010-P1-K1-A12
atgtgcacttgttcaaaacatttatagtatatgcctgttagcacatgcatgaagggccataattcgtatgggtggccccttcgggcgcacctagaattcggctgcaacattgcacgggtttgtacgctgacaaatgttactccgccgtcctgagtaagacttgaagtgcaccaaataaattgggctggtatggcactggatcaatgccatgcagagagtgatttttgtgcctggcgcatgcacaaagcgaatgtgcgttcgaacatgtt

SEQ ID NO: 3628 - DNA, 317 bp, Lilium asiatic
  Clone ID: LIB3230-010-P1-K1-A2
atacgattcccttctcatcaatttgagtatttttatattcctgcaagattgctgaatgaattttcagggggtagtgggtggtttttaagtagaaggatatatactggagagaacaaatacagacatgagataacaaatacagacaggagataaaagtatagaagctaactccctctactggtgtttttcctccatctcagaaccgctgtgtgaatatgatagccaatctctttaatgcccctattgggactcacgaaacaacagtgggagttggcaccgtgggctcatcagaagctatcatgctggcaggattagca

SEQ ID NO: 3629 - DNA, 387 bp, Lilium asiatic
  Clone ID: LIB3230-010-P1-K1-A3
acgcggacgcgtggggggaacataccatggttggtactgcaactacatcgaactcagagtgacgggtccgtatgtcgcttgtgatcagcagctgtttacgattgatcagtggctagctactgatgcgtcgccatacaagctgtttgcggcggtagatgtctgccctcccgctgaggacatcgctgtcgccggagctggaggtggaggccatggctggcgtggtctgcccgaccatgaagcgtgatgagctggcggttgagtaatgttgttgggtccggtgaatgtggtcgtgtagctcgtggtgtcttcttattattgtcgaatcgcatcaatttatcttgcaaaaaaaaaaaaattgggtggcctgttttagagatccaagcttac

SEQ ID NO: 3630 - DNA, 344 bp, Lilium asiatic
  Clone ID: LIB3230-010-P1-K1-A5
cggacgcgtgggttgtgttgcttgggcctttggactcggattggagcgactggcggtggttctctgtgatattggagatacttcggaactctggacaacagatcagcggttcacttcacaattttccgagggacggcttggtgtcaaattcaagccattttcaaagtttcctccatgttacaaggacatgagcttttggattagtgattcattcaccgagaacaatttatgtgaaattgtcagagcagtagctggggatcttgcagaagatgtaagacttatcgatgacttcacaaacaaaaaggtaatgaccaactctctgttataggattacatattgttct

SEQ ID NO: 3631 - DNA, 253 bp, Lilium asiatic
  Clone ID: LIB3230-010-P1-K1-A7
acgatacgattcccttctcatcaatttgagtatttttatattcctgcaagattgctgaatgaattttcaggtggtagtgggtggtttttaagcagaaggatatatactggagagaacaaatacagacatgagataacaaatacagacaggagataaaagtataaaaactaactccctctactggtggttttccttcatctcaaaaccgctgtgttaatatgaaagccaatctctttaaatcccctattgggac

SEQ ID NO: 3632 - DNA, 166 bp, Lilium asiatic
  unsure (1)..(166): unsure at all n locations
  Clone ID: LIB3230-010-P1-K1-A9
acgcgaacacaggttgatcgagattagcatgaatgatgctcgcaccccggataccggacccacttttgttatgttggataggaaancaagatcacacaacctagattatcaatacgctcggcatcgaccgcatataaaactagctgcggcggaccataacaaagcc

SEQ ID NO: 3633 - DNA, 351 bp, Lilium asiatic
  Clone ID: LIB3230-010-P1-K1-B1
cggacgcgtgggttgtgttgcttgggcctttgtactcggattggagcgactggcaatgggactctttgatatttcactatgttacggaatcactggacagcaaaccagattatcacgtcacaatttttcgagggacggctagttgtcaaatccgagccatagacagagtgttactgcgtgtgacaaggacatgagcttttggattagtgattcattcaccgagaacaatttatgtgaaattgtcatagcagtagctgtggatcctgcagcatacgtgtgtactgttgatgacctcgcataccaacagggaatgaccagccactgttataggattacatatcgatcgaaagg

SEQ ID NO: 3634 - DNA, 345 bp, Lilium asiatic
  Clone ID: LIB3230-010-P1-K1-B10
acgaacgatattacacgtgaacggtcactttggggcataggtcggcgatagtgtgtgcgaaggtccttcatgcgtatgcatgttttcttcgtgcgcatcacccatgccttctgggtacgcaactgaagccattgtcggcgtatgggactatgccatcatgcatttatgacaaagccgactatcgagatagatctgatccggagcgctcgctctatgaggcaaaggcatatgtcatatgatcgcatacaacttaggggggagtagtgggacaactctgcgcgcaaccgctatacatgcatatgccttagtacactcatatatgcattccgtgctgacattaatacc

SEQ ID NO: 3635 - DNA, 393 bp, Lilium asiatic
  Clone ID: LIB3230-010-P1-K1-B11
aaagaaactccacctacatcttaagatcttatccttcagcggaggattgcagaagtcacagataaggatagactgattgagctagcggagataatctaccgcttggatcgacaaacattcattgaccatgatatctcaatgattgccactttactatcatccaaggatcctagaggccttgtagattcatcgcccaaccaagaacataaactgcaagccgttcactcctcagatgcaatggagatgatacaaagtcatctaactctcgctcttggagatagagtagtctgccctctaaacaccattgtccaaatcagcaagctcaagcttgggaagctctacactgcttccatcatgtatggctacttcctcaagagagtcgaccagcgatac

SEQ ID NO: 3636 - DNA, 391 bp, Lilium asiatic
  Clone ID: LIB3230-010-P1-K1-B12
atgtgcacttgtccaaaacatttataggaggtacctgttagcacatgcatgaaatgagataattcttatgggtagcccctttggtcgttcctagttttgggctgcaacattgcaggtgtttgtgcgctgccaaatgttaagccgtcgtcgtgagtaggacttgaagtgcaccaaataaattcggttggtatggcaatggatcagtgccatcccgagagtgatttttgtgcccggggcatgcacaaagcgaatgtgcgttcgaacatgttcaagcagtggttgggtatctgcaactgttacttgagtttgtcatgttcaagcagtggttgggtatcctgtaactgttacttgagttttttctgcaatggttgggtatcctgcgactggtgag

SEQ ID NO: 3637 - DNA, 400 bp, Lilium asiatic
  Clone ID: LIB3230-010-P1-K1-B2
gataaaatgagacctgaagacagagttgccattcatgaggcgatggaacagcagaccatttccatagcgaaggccggaatcactacggtactcaactcaaggacatctgtacttgcagcagctaatcctccgtctggccgatatgatgatctgaagactgcacaggataacattgatttgcagactacgatcctttccagatttgatctgatatttattgttaaagacattaggcagtatgcccaagatcagcgaatagcaagccatattataaaggtccatgcaagtggtgctacaaattcgaaaacaaatgaagctggggaaggagaaaattggctgaaaaggtatatcgaatactgacgatcttactgtcagccacggctatctgaacaggcttttg

SEQ ID NO: 3638 - DNA, 317 bp, Lilium asiatic
  Clone ID: LIB3230-010-P1-K1-B7
cgaacatcaggttgatcgagatgagcatgaatgatgcttggtttcgtgataccggaccgacttttgttatacttgataggaaatcaagttcaggaaacctagattatcaagttgctggcattgactggaatttcaatagctggggcggaccggaagaaggctgttatagtgattggagtctggaccttcatgttgccaagaagattgtggaagtggagaggcttcctagatttccacatcagatggtccttgagggcggaagcattcatgtagacggagaaggtacttgcataacaactgaagaatgcttgctaaat

SEQ ID NO: 3639 - DNA, 394 bp, Lilium asiatic
  unsure (1)..(394): unsure at all n locations
  Clone ID: LIB3230-010-P1-K1-C1
aagggacggggcgagctaccggatggattatggagaggattcatcaatgtctttcaagactacaatcccagnatccgcagcctcaaactgcagtgttgttgacaaacccttctgcttcatatggtcaggcaactgctggaactgtccctcggggtgctccctcggatcaggtgaaaaactctgttttttcaaatgctctttccagccctgtccgtcggagcttacagccgtatcagctggcccagggaggggcatgctatccaaatggtggacagggagctaggaaccatgatgtgaactctctggctcataaccgcgcgaactctcccagctcaaatgattcgtctatggacatgcattcggatagcccccctcatgaatcttaaggtacagt

SEQ ID NO: 3640 - DNA, 391 bp, Lilium asiatic
  Clone ID: LIB3230-010-P1-K1-C11
aaagaaactccacctacatctcaagatcttctccttcagcggaggattgcagaagtcaaagagaaggaaagacagattgagctagcggagataatctactgcttggttgtgcaaaaattcattgaaaatgagatctcaatgattcccactttactatcgtccaaggatcctagtggccttgtagattcattgcccaaccaagaacataaactgcaagccgttcactcctcagatgcaatggagatgatacaaagtcatctaactctcgttcttggagatagagtagtcggccctctaaacaccattgtccaaatcagcaagctcaagcttgggaagctctacgctgcttccatcatgtatggctacttcctcaagagagtcgaccagcgat

SEQ ID NO: 3641 - DNA, 395 bp, Lilium asiatic
  Clone ID: LIB3230-010-P1-K1-C12
ggaggtgcttggtgataaggttgagaaggttgtggtttctgaccgagtggttgattctccttgctgtttggtcacgggtgagtatggatggacggccaacatggagaggattatgaaggcccaagcgctgagggactccagcatggctggttacatgtcaagcaagaagaccatggaaatcaacccggagaactccatcatggaatagctggggaagcggtctgatgctgacaagaacgacaagtcagccaaggaccttgagtcgctgctgtttgaaactgcactgctcacctctggtttcagcctcgatgagcccaacaccttcggctacaggattcaccgcatgttgaagcttggcctcaacattgacgatgatgaggtatcagccgatgctg

SEQ ID NO: 3642 - DNA, 398 bp, Lilium asiatic
  Clone ID: LIB3230-010-P1-K1-C2
ggattgggggcgactgcatgttcacgttgcttcgtataataattttccgacggctgcgggtttggcgtcatcggcagctggttttgcttgtcttgtctactcccttgcgaaactaatgaatgctaaggaagagcttggagaactttcctcgattgccaggcaaggttcaggcagtgcatgtcgaagtttgtatggtggatttgtcaagtggaagatgggaagtgacgcaaatggaagtgacagcatagctgtccaacttgctagtgatacacattggaaggacttggttgttatcgtagccgtggtaagttcaaggcagaaggaaacgagtagcacctcaggcatgcgtgagagtgttgacacaagtactcttttggaacacagggccaaggtggtag

SEQ ID NO: 3643 - DNA, 368 bp, Lilium asiatic
  Clone ID: LIB3230-010-P1-K1-C3
gtcccggcctccaaggtagggggctttttacatgaagaagaagaggtcgaagaagtgaggggagacctacaagatctacatcttcaaggtgctgaagcaggtccatccggacatcggaatctccagcaaggccatggggatcatgaacagcttcatcaatgatctcttcgagaagatggcacaggagtccgcccgcctcgcccgctacaacaagaagaacaccattacctcccgggagattcagacctccgtccgcctcgtccttcctggtgagctcgccaagcatgctgtctttgagggcaccaagtttaccagtgctttgagtatttctactgttcaagggttctcatctggcatgtattactttt

SEQ ID NO: 3644 - DNA, 393 bp, Lilium asiatic
  Clone ID: LIB3230-010-P1-K1-C7
ggagtgtattttgcagatatgttctcaaagagtgcaaattattgctttgcatcggagcaatctaggactagtgttctgctttatgtgagaaggacagaacctttaatttacatgctgatcgggaccttagtgttgatcgccctgatacagtgataaactactaaagtcggagaagttagagtttgtacacaccgatatttggggtcttactcagaaggacagaacctttaatttacatgctgatcgggaccttagtgttgatcgccctgatacagtgataaactactaaagtcggagaagttagagtttgtacacaccgatatttggggtcttactcagaaagacagaacctttaatttacatgctgatcgggaccttaatgttgatcgccct

SEQ ID NO: 3645 - DNA, 398 bp, Lilium asiatic
  Clone ID: LIB3230-010-P1-K1-D10
taatgtcacatcttactccatcgataactgaagtcaatgaatctgaattcctggaagatgcttcccctgcaaagaaactgattgaagaagagaaaaatgcagtgacagacggagacgccgcagcgaaactctctgaggagctctctctgtttgaatcatacatgaaattcatggatatcccatatcttgaagggaatttaagtgagtcgatggacagtctcttaggaaatgatgtaactcaggatggggcgagtcaggtggagctgtggagctttgatgacatgcctgctactgtctgttgaggtaagtgttctgctctttatgtagataaggattaaacataagttggtatcttattttttgcttctgatccaagtcttggcttgatgatgttgatt

SEQ ID NO: 3646 - DNA, 323 bp, Lilium asiatic
  Clone ID: LIB3230-010-P1-K1-D2
gcggcggcagggcttctatcaagcagttcgttaccatagacggcgcggaaacgggggcgggtcaccccttattgaagaatccccaccgctgccgccccgacacggtggcgctgctgaagatccctaagtaccaaaatagcactgatctcctgatccgcaagctcccgttcaagcgcctgatgagggagattgtttaggacttcaaggctgacctacacttccagagctccgatgtctcatcacttcatgaggcctcaaatgcctacttgaacagactgtaagtagtcagttaagcttgtgcaccatccatgcgaagatcgtta

SEQ ID NO: 3647 - DNA, 286 bp, Lilium asiatic
  unsure (1)..(286): unsure at all n locations
  Clone ID: LIB3230-010-P1-K1-D8
ttccgttacccggcttcttaaatttttattcccattccatcttcgnngccggtccgtctacatatatttagggctgcagacacgaggtcaaacctgtatccactgtcaagtgtgagcctggacatggctttatcctgcacgtttcccaggctgtccttggagaatcaaataaaattgacatttccttaatgtatttcaaagttgatgactaaaagcttgccattggatcactctctatcctctaatactcacatattacttttcttattattttttattaataaat

SEQ ID NO: 3648 - DNA, 273 bp, Lilium asiatic
  unsure (1)..(273): unsure at all n locations
  Clone ID: LIB3230-010-P1-K1-E1
atacagacatttgtttacccaccggaaaatngcaggcgccggtggnaaacacaggtgctagatcaacaacagaacgcccaaagggaaaatacaaaccccaagagaaactacaaatataatacaaatgatcacacgcccaaacaaaaactactataccctaaagtgaacacagtacaaacaaatattctatataagaaaaaaaaccatcgagctctcaccatggaccaagagacacgaacagaagccgaaaaacatgtataaaagatgaaattt

SEQ ID NO: 3649 - DNA, 387 bp, Lilium asiatic
  Clone ID: LIB3230-010-P1-K1-E10
cggacgcgtgggagcctataagagttttttcactatggacttgcagaaccgcgggagactcatttgacttgtggaattcgcagaaatgcaaaagttattgagcacagaatgctaactgcacatttaggaatatcgaagctaccaccatgtttgaaggacacaaacctatttacaagcattgctagcaagtaggattatcgacaccggaacgcccagatggttagtagatgcttagtcgaactacacacactgatatagtgcacgaagcggcctgttgacacggaagctaagattgtgaagataaaatcaaatggatttataatcttcgttccgcaataaggcatataaggtccaatttaccttctgccaaaaggagaataaggatgt

SEQ ID NO: 3650 - DNA, 399 bp, Lilium asiatic
  Clone ID: LIB3230-010-P1-K1-E11
atggattcacgggcgactggtgtgtcggctggatggcgggagattgaggttggtgatgttgaggatctggatgtttttaaggagacaattgagctgatgtatgagaaggacatgatgcggcagattatgaagggaggtgtttctctggcgatcggcatacttgaggtatcttccatcatcatgtttgatagaggcatcacatcatgtttaaattacctcgaggccgttccgtggaccgagagtgaggaagagaagctgaaaaacttgtttgaaagatgtacctttgataacacagtatctcaagatgtgctagccaggttaggcccaaaagattcagccaattcagaagacctagccgtccggctaatacagtcggtaacaaatggagctaatggcaat

SEQ ID NO: 3651 - DNA, 399 bp, Lilium asiatic
  Clone ID: LIB3230-010-P1-K1-E12
cggacgcgtgggtgcttatgctgcagcgcaagtcaagaaggccatggaggtcacacattatctaggaggagagaattttgttttctggggtgggcgagaagggtatcaatctcttttgaacactgatatggaaagagagctcaatcacatggcaagattctttcaagcagctgttgagtggaaacaaaagattgggttcaatgggactctattaatagaacccaaacctcaagagcctacaaaacaccagtatgactgggatgctgcaacttcgtttgcatttctgcagaagtatggtcttctaggggaatttaaactgaatatcgagtgcaaccatgcaactctatctggacatagctgccaccatgaacttgaaactgcgagaataaatggaatact

SEQ ID NO: 3652 - DNA, 393 bp, Lilium asiatic
  Clone ID: LIB3230-010-P1-K1-E2
ccggcggcaaggctcctcgcaagcagctcgctcaccaaggcggcgcggaagtcggcgccggccaccggcggcgtgaagaagccccaccgcttccgccccggcacggtggcgctgcgggagatccgcaagtaccagaagagcactgagctcctgatccgcaagctccccttccagcgcctggtgagggagattgctcaggacttcaaggctgacctccgcttccagagctccgctgtctcagcgcttcaggaggcctcggaggcatacttggtgggactgttcgaggacactaacctgtgcgccatccacgccaagcgcgtcaccatcatgcccaaagacattcagctcgcccgccgcatccgtggggagagagcctgaattgtctttgttttc

SEQ ID NO: 3653 - DNA, 401 bp, Lilium asiatic
  unsure (1)..(401): unsure at all n locations
  Clone ID: LIB3230-010-P1-K1-E7
gcgacccacgcgnncgagggangcacgtgcatctggtgtgttttttggatcgcgggcgatcgagggggtggatgtttaatatttggatgtgattacaaacacattcgagctgatgtatgagaaggacatgatgcaagcacattatgaacggaggtgtttctctggcgatcggcatacttgatgtatatttcatcatcatgtttgatagacgcatcacatcatgtttaaattaccttgaggacgctccatggaccgagagtcatgaatagaagctgaaaaacttgtttgaaagatgtaccttttataacacaatataccaagatgtgctatcccggttaggcccaaaagattcagcctattcttaataccttgctgtccagcttatacagtctttcacaaaa

SEQ ID NO: 3654 - DNA, 392 bp, Lilium asiatic
  Clone ID: LIB3230-010-P1-K1-E8
cctctgggtgccgtcctccaagtgctttttctcgatcgcttgctacttccgctggcgctacaagtcatggcaggcaagcacttacaagaagaacggaaaacctgctgccattcgctatggaactggttccattgctggttttttcagtgaggatagcgttacattaggtgatctggttgtgaaggatcaggaatttattgaagctacaaaggagccagggcttaccttcatggttgcaaaatttgatggcattcttgggctaggctttcaagaaatctctgttgggaatgcaacaccagtgtggtataacatggtgaaacaaggtctcatcagcgaccctgttatctctttctggtttaacacgacatgctgatgaaggagaaggtggtgaa

SEQ ID NO: 3655 - DNA, 399 bp, Lilium asiatic
  Clone ID: LIB3230-010-P1-K1-F10
cggacgcgtgggagcccgtcagagtttctccactatggacttgcagcaccgctttacactcatttcacttctcccattcgcagatatgcagatgttattgttcacagattgctagctgcagctttaggaatatcgaagctaccaccagtttttcaggacagaaacctatttacaagcattgctgacaatttgaattatcgacaccggaacgcccagatggctagtagagcctcagttgaactccacacactgatatatttcaggaagcggcctgttgacacggaagctaggattgtgaagataaaatcaaatggatttatagtcttcgttcccaagtttggcatagaaggcccagtttacctcgtgccaaaaggagaaaaaggaggtgagtgggttgtc

SEQ ID NO: 3656 - DNA, 348 bp, Lilium asiatic
  Clone ID: LIB3230-010-P1-K1-F11
ttgatatctataaaagtctgaaataaaaaatatcaaacttggtcagaactttgggaggccaacctgggtattaatcaactaaaaaggcttctctttaaaggggtaccgggcataacccctttaacgcctcaaggtggcccttccaatcttccagaacatccgtgaaggggctcgcttcttgtacttccgcgaatggctcttggtatttgtcaacactcgggagctcatgtacaaagccttctggaagaaggcctgagttcttgcatccgtccaatatttcaacttcaacttcggtgtcgtcctcaacacttatgttccactcggtatccatgtgaaatgggtggtctt

SEQ ID NO: 3657 - DNA, 364 bp, Lilium asiatic
  Clone ID: LIB3230-010-P1-K1-F12
ttgatatctataaatgtctgaaaggaaatatatcaatcttgttcagaactttggtaggcaaacttggatattagtcaactaaaaaggcttctctttaaggagttacaggtcataacgcatttagcgcatcaagttgtcgctgcagatcttcgagatcatcggtgatggggctcgcttcttgtacttcggcgattggctcttggtatttgtcagcactcgggagctcatgtacaaggccttctggaagagggcctgagttcttgcatccgtccaatatttcaacttcaacttcggtgtcgtcctcaacacttatgttccactcgttatccatgtgaattggttgctctttctccacagaagcttc

SEQ ID NO: 3658 - DNA, 337 bp, Lilium asiatic
  Clone ID: LIB3230-010-P1-K1-F3
gaataaggctttagatgtggtaggatggcatttggcaaaagcccgaggatggatagtaggaggacttcgtcggggtattgctcgacgacaacactagttgtgttcgtcgctctctgcttggtaggagtgtggatgatgacctcgtcgactgttgtgcctgaagaaatctcttcatctgagaacaaatctgagatgaaagatcaggcttctgaggttgattctaaaccgtttgaggatagctcgggggatgtgccagaagattcaaagagaggagagccaaatagcaatgccaatactttaccggatgaaactaattctgaagcggctaccgagcagg

SEQ ID NO: 3659 - DNA, 281 bp, Lilium asiatic
  Clone ID: LIB3230-010-P1-K1-F4
aaaaaattaaaaaaaaaaaaaaaaaaaatataataaaaaaaaaaaaaaaaaaaaaaaaaaaaaaaaaaaaaaaaaaaaaaaaaaaaaaaaaaaaaaaaaaaaagaaaaaaaaaaaaaaaaaaaaaaaaaaaaaaaaaaaaaaaaaaaaaaaaataaaaaaaaaaaaaaagaaaaaaaaaaaaaaaaaaaataaaataaaaaaaaaaaataaaaaaaaaaaaaaataaaaaaaaaaaaaaagaaaaaaaaaaaaaaaaaaaaaaaaaataaaaaaaaaaaaa

SEQ ID NO: 3660 - DNA, 313 bp, Lilium asiatic
  unsure (1)..(313): unsure at all n locations
  Clone ID: LIB3230-010-P1-K1-F5
aaaaaaaaaaannaaaaaggggggggggaaaaaaaaaaaaattggtgggagaaaaaaaaaaacacaaaaaataaatataaaaaaaaaaataaaaaaaaatatattaaaaaaaaaaaaaaaaaaacaaaaaattatttaaaaaaaatatataaaataaaaaaataaaaaaataataaataaaaacaaaaaattaaaaaaaaataaaaaaaccaacaaattaaaaaaaaaaaaaaattaaaaaaataaaaaaaaaaaatataataataaaaaaataaataaaaaaataaaatattaaacaaaataaaaaataaat

SEQ ID NO: 3661 - DNA, 140 bp, Lilium asiatic
  unsure (1)..(140): unsure at all n locations
  Clone ID: LIB3230-010-P1-K1-G1
atattatgccanccataaangnccgaaagtaaatatatcaatgtgtttgataaccccaaaagccaaactnggatattattcaactaaaaaggcttctctttaaggagttacaggtcataacccatttatctcatcaagtt

SEQ ID NO: 3662 - DNA, 170 bp, Lilium asiatic
  Clone ID: LIB3230-010-P1-K1-G11
ttgacatctataaatgccgggaagagaatatatcaatcttgttcggaacaccggcaggcaaacttggatattatgcaactaaaaaggcttctctttaaggagttacaggtcataacgcatttatcgcatcaagttgtcgctgcaaatcttcgagatcatcggtgatgggg

SEQ ID NO: 3663 - DNA, 400 bp, Lilium asiatic
  unsure (1)..(400): unsure at all n locations
  Clone ID: LIB3230-010-P1-K1-G12
acggaaccnccccggggcgaccacacgcccgtccgcgccgagccggcgcccccttttttcttttttatattcttgatatcctataaagtgccgcgggaggagaatatatcaatgtttgtggcggaacttcgagcaggcaaaccttggatattagtcaactaaaaaggcttctctttaaggagttacaggtcataacgcatttaacgcatcaagttgtcgctgcagatcttcgagatcatcggtgatggggctcgcttcttgtacttcggcgattggctcttggcatttgtcagcactcgggagctcatgtacaaggccttttggaagagggcctgagttcttgcatccatccaatatttcaatttcaacttcggtgttctcctcaacacttatgttccac

SEQ ID NO: 3664 - DNA, 393 bp, Lilium asiatic
  unsure (1)..(393): unsure at all n locations
  Clone ID: LIB3230-010-P1-K1-G2
cggacgcgtgggcggacgcttgggcttacgtttgggcggacgcgtggacagcaggggactgtgacacggtggtacggagtggagganaatggagggggagcacaagttaccctcatggggctcacattcacggaggttctagggacggatctgcctatatctggcaggtgaacaagcctgaaaggcctccagacttgttgaatggccatgaaagagaggttactgctgtaaactggtgcacttttgaaattggaaaaatagccacttcttttgatgaattcatggaccgaatctggaacataaatgaaagcatcagcttaaacatatccactctcacctgtattcgtaagagaataactgtttcttcaaacttttattgtttgaagttgataa

SEQ ID NO: 3665 - DNA, 403 bp, Lilium asiatic
  Clone ID: LIB3230-010-P1-K1-G3
cggacgcgtgggcggacgcgtgggcggacgcgtgggcggacgcgtgggcagcaatggactgtgacacttttgacaaagtggaggagaatggagggggagcagaggatagcttcggtgggcagtttgagacaaaatttaatggtttggagcggttgaactcgactgatctcctccaagcggtcacggatggcaatgtctcatacaacatgccacagcactccctcagccaatcttccgacgatttcttagttacggggaccggaacacataagaacatcgcatcaggatctggtctggccagtccattctcttttgtcaagagggacggtgatgaggtgcagccgtgtggccagatcaatccgcagaagagaatgcgaagtgaaggacaatggggtggcaataa

SEQ ID NO: 3666 - DNA, 373 bp, Lilium asiatic
  unsure (1)..(373): unsure at all n locations
  Clone ID: LIB3230-010-P1-K1-G4
gggaggcatattatctggcagttttatcttttggattgggatccgatgcgggaggttaaggataaatttgtggggtgaacgcacganggacggagggagtggtaggagaagattagggcgaagagggatgctgtcaagaaggatatggaggtggcggcgaagagggatgtgggattgtgtgaaagagaatgcagggaagaggtcggatcttatgcttcagcgatgacttctatggatttgtctccactcgggagactatgtaccaaggcttctggaagagggcctgacttcttgcatccgtccaatattttaacttcaacttcggtgccgtcctcaacaacttatgatccactcgttatccatgtgaattgga

SEQ ID NO: 3667 - DNA, 398 bp, Lilium asiatic
  Clone ID: LIB3230-010-P1-K1-G8
ggacaatagaatttacatgtatgatatacttcgtcttgacaaagatccctgtaaaatcttctcaggaagcaagattgggtccttctatgtaaagtcggcaattagccctgatggagctcacattcttggtggttctagtgacggttctgcctatatctggcaggtgaacaagcctgaaaggcctccagtcttgttgaatggccatgaaggagaggttactgctgtagactggtgcacttctgaagttggaaaaatagcaacttcttctgatgatttcatggtccgaatctggaacataaatgagagcagcagcataaacataacgactccgacctgtatccgaaagagaataactgcttctccaagctttgagtgtaagaagttgataatggatgagc

SEQ ID NO: 3668 - DNA, 360 bp, Lilium asiatic
  Clone ID: LIB3230-010-P1-K1-G9
tttcttgactaataacattgctgggcttacataacatttttagcgaccttataatacataatagactgagaatgcaaaacataacatgtccacttagagaaagattacttaaaacttggaacttagttaaagcgcagagagcctaaaattcttcacagctgctcaaacacagaaagcaacctaaccggtgttctgcatgccagccgcgacacccttcatggtcaggataagtgtattctccagcccaagggcatactctctccccggtttcagcttgacaagttctgcagctgctttaccagaattcatgatctccttcgacaaatgtggcctcaccttcacattataacttgggtccct

SEQ ID NO: 3669 - DNA, 405 bp, Lilium asiatic
  Clone ID: LIB3230-010-P1-K1-H4
ctcgtcttcacttgagcagcgatgtcaggacgtggcaagggcggtaaggggcttggaaagggcggagcgaagcgtcaccgcaaggtcctccgcgacaacatccaggggatcaccaagccggccatccgccgcctcgcccgccgcggcggtgtgaagcgcatcagcggcctcatctatgaggagacccgcggggtgctcaaaatcttcttggagaacgtcatccgtgacgccgtcacctacaccgagcacgcccgccgtaagacggtgacggccatggacgtggtctacgcactcaagcgccagggacgcaccctctatggcttcggcggctgattggggatcggatctcgggtttcatttggattatgttttcttgtctttgttgttggatgtaaatctttggag

SEQ ID NO: 3670 - DNA, 336 bp, Lilium asiatic
  unsure (1)..(336): unsure at all n locations
  Clone ID: LIB3230-010-P1-K1-H5
tctcgcgnnnagaagaagcttctgctgnnagaagaagctcgannnaggccggnngaagaagggtcnctncggcctcgcaagggaggggggctcttcttgacaagannagaagaagagggggtcgaagaanngtcggtggagacccctacaagatctacantcttcaaggtgtntgaagcaggtccacctctgacattcgggatctccagcaaggcaatggnggatcatgaacagcttcatcaatgatctctttgagaagatggctcaggagtccgcccgccttgctcgctacaacaagaagaacaccatcacctctcgggagattcagacttccgt

SEQ ID NO: 3671 - DNA, 179 bp, Lilium asiatic
  Clone ID: LIB3230-010-P1-K1-H8
acactcactcggcacaatacaatctacatgaaccatgctcacgtacgcgaccatgctacgtgcgagctcttctatagaggcacgaaagtccacttcactggccagccggcaacaaccccttaacgagcacacattctccgtggctctactgactggtctgcctatatatcgcacgttaa

SEQ ID NO: 3672 - DNA, 138 bp, Lilium asiatic
  Clone ID: LIB3230-010-P1-K1-H9
cggaaaaaaaacctactgagaagaagtttaaggccgcgaagaaggtccccgcctgcaagtataaagccttttacaagaataaaaaaaggtccaagaaatcactagacacctacaaaagtcacatcttccaggggttta

SEQ ID NO: 3673 - DNA, 330 bp, Lilium asiatic
  Clone ID: LIB3230-011-P1-K1-A1
acatctgaacaatgaaagagaatatcaaattcaaacatgacatagtaaccatacaagatcaagccaatcacccttaacataataaccatacaagatcaagccaatactggtgatgcacacacaaataatccaacatacagaatatcataaaagcaattatgaatgcccaagaccagaactcagtagtcttcaggctcatccccatcatcttcaacaccctcagctccgacttcttcatagtccttttcaagagcagcaagatcctctctggcctctgagaactccccttcttccatgccctcgcccacataccaatgcacaaaagcacgc

SEQ ID NO: 3674 - DNA, 366 bp, Lilium asiatic
  Clone ID: LIB3230-011-P1-K1-A10
tcgtcgactcagcccccaccgcaccaattgaagcgcccgccgtcgatggggcgggggccgttttcgtctttgtcccgccgccgaagccggccaaggtgaaagctacgaaggcgcccaaggagaagaaggcctcaacgaagaagcctgccgtgcatcccccatatcttgagatgattggcgaggcgatcgcgtcgctgaaggagaggaccggatcgagccagtacgcgatctcgaagttcatggaagacaagcacaaggctcacctcccggccaacttcaagaagctcctcctcgttcagcttcggaaacttaccgccgtcggcaaactcaccaaggtcaagaactcttataagatctctgccaagc

SEQ ID NO: 3675 - DNA, 243 bp, Lilium asiatic
  unsure (1)..(243): unsure at all n locations
  Clone ID: LIB3230-011-P1-K1-A11
ncnnctcctnancccccaactaaccaatacatacgacccaccaccaacgtgcatgtgaaaaatatttatttgaccccccaccaccaaacccnaacaacaaaaaagataccaaacctcccaaaaaaaacactccctcaacaaaaaagcctaaccaacatcccacatatcccaaaaaaacaaacaccacaaacacatcaccaaaatcaacaaccaaaacaacccaaacccccacctcaaaccaaa

SEQ ID NO: 3676 - DNA, 343 bp, Lilium asiatic
  unsure (1)..(343): unsure at all n locations
  Clone ID: LIB3230-011-P1-K1-A12
cggacgcgtgggttttttttttttttttttttttttttttttttttttttttgggtttttttttttttttggggaatgncccaagggatcaaggtccaaagggcaacgaaaactttgagacaacaaaaaactggttcaaaaagatggagcgctcgaatgctacagtctatgtgcccaacttcagtgggcataacatggcgagcaggagtctaattgggataatctcaatttgtttagggggagttgatataaagttctatccattttttttctaagtcttgtttcccaaattctaggcccgtttacattgaggcgttaaagatttgccctcctagttggattc

SEQ ID NO: 3677 - DNA, 352 bp, Lilium asiatic
  Clone ID: LIB3230-011-P1-K1-A2
cgtttctccttttttttacaaggggacgggggaagataatattttattcaaacacaaatcaagcacgtgaaagagggcaatctgaagaaccacgaccctaatatcgaaacttaaaaatgtaaaaaaagcggacccaatattttataataagcatttcatttatccgaaaccgccaatgaagtattccgacaaaaaagtgatagtcaccttttcttcatttgctgcctccatatttgatatcgccgactttctttcctcctgtgggcatgttgtacatcatgaagtgataagtgatatgccgactaatgttgcacttgtcactttcaaagatccacaagaagcacaacgctca

SEQ ID NO: 3678 - DNA, 384 bp, Lilium asiatic
  Clone ID: LIB3230-011-P1-K1-A3
atcgaagatgagatggcaaggacacagaagaacaaagctacagcgcaccatctcggattgctcaaggctaaactagcgaagttacgtcgagagcttctggaaccttccgcaaaagggggaggtggtgctggtcaaggttttgacgttactaaaagtggtgatgctcgggtcggacttgtggggtttccttctgttgggaaatcaacccttcttaacaagttaacaggcaccttttccgaggttgcctcatacgagtttactactttaacctgcattcctggagtgatcgtgtacagaggtgctaaaattcagttgttggatcttccaggaatcattgagggtgcaaaggatggaaagggtagaggaaggcaagtgatcagcact

SEQ ID NO: 3679 - DNA, 393 bp, Lilium asiatic
  Clone ID: LIB3230-011-P1-K1-A4
gagaaaatggcccctcccgcgaaagttgccaagaagcctgatggtaaagcacaagcattgaaagttgccaaggctgtgaaatctggtgcttcaaccctgcaaaagaaggccaagaagatccgcacatcggtgacctttcatcgtcccaagaccctgaagaaggatagaaaccccaagtaccccagaatcagtgcccctccaaggaacaagctagatcactaccagatcctcaagtatccactgaccactgagtctgccatgaaaaagattgaagacaacaacactcttgttttcattgttgacatccgagctgacaagaagaagattaaagctgctgtgaagaagatgtatgatattcagacaaaaaaagtgaacaccctgatcaagcctgat

SEQ ID NO: 3680 - DNA, 391 bp, Lilium asiatic
  Clone ID: LIB3230-011-P1-K1-A5
ggagaaatcattcttcaaggcgcagatcttatgcatctagttaccattctcgtcgccgatctccaaggaagccttggtcggcacctgctaaccgcaacactggaattggaaggcccggaaataatttatttattgcaggttttagctatgttactaccgagagagatctggaaaagaagttctgcagattcggtcgtgtggtcgatggtcgggtagttttagagagaatgacggtggattctagaggctttggattcttatatttcgaaaaggatgaagatgctgatgctgccatacgagcaattgatcagactgagtggaatggtaagattgttctggttgagaaatcaaagacatgcctacgatgtagcaagttggagctttctgatga

SEQ ID NO: 3681 - DNA, 370 bp, Lilium asiatic
  Clone ID: LIB3230-011-P1-K1-A6
gaagtataggagcattggatccagtaccctgcgcattgtagtgctctccttggctagttcggccagtttgtgaatacaaatatgagaccacacctccggagattcacgctcctctcttgtcaatgcagaacaatctctagtctctggtcgtggcctaatggccatattgttgggaccaagatcgtcaccaatcattgcaccaactcgtgcttcagatctaactacttcattaacccaattatggtgtgacccgtgcctttcatcagcaccatctttgtctattcgataattttccaaggtggcattgattatctcatcaaaatcagcgaaaatgtatgaatactccgtcatataccacaccatggcagac

SEQ ID NO: 3682 - DNA, 383 bp, Lilium asiatic
  unsure (1)..(383): unsure at all n locations
  Clone ID: LIB3230-011-P1-K1-A7
cgcacgcatgggttttttttttttaattttattaacattgaacccaggaccatgttaaatttttatttatttcaaacaccacatancaaccanacaaaatcaagccaataacccttaacataataaccatacaagatcaagcaaattctggatatccacacacatattatccaacatacagaatatcataaaagcatttcttaattcccaaaaacaaaacaaaaaaatctttactcacatccccataataaaaaacaccactaaaaacaactttatagaaatctgtaaaaaaaacaaaaaacacattttttacttaataacaaaactcctttcatgccctcgcccacataccaaaaaacaaaagcacacccccagtacatcaa

SEQ ID NO: 3683 - DNA, 391 bp, Lilium asiatic
  Clone ID: LIB3230-011-P1-K1-A8
cccacgcgtccgcccacgcgtccgcggacgcgtgggtttcggatgggtatgcactgtcgcatccggtttacaatttagtatatcaagcacgtgaagagggttatgtgatgaacgaggacctcaaagtggaaattaaaaatgtgaagaaagcggacccaatattttatagtaagcatttcatttataggaaaccgccaatgaagtattcggacaaaaaagtgatagtcaccttttcttcatttgctgcctccatatttgataatcgcgactttttttccttctgggggcatgttgtacatcatgaagagataagggatatgccgactaatgttggacttgtgactttcaaagaattacaagaaggacaacgtgcaggtatttttgactcgac

SEQ ID NO: 3684 - DNA, 314 bp, Lilium asiatic
  Clone ID: LIB3230-011-P1-K1-A9
ccgtcgactcagcccccaccgcaccaattgaagcgcccgccgtcgatctcgcccgggccgtggccgcctatgtcccgccggctaagccggccaaggtgaaagctacgaaggcgcccaaggagaagaaggcctcaacgaagaagcctgccgtgcatcccccatatcttgagatgattggcgaggcgatcgcgtcgctgaaggagaggaccggatcgagccagtacgcgatctcgaagttcatggaagacaagcacaaggctcacctcccggccaacttcaagaagctcctactcgttcaacttcggaaacttacc

SEQ ID NO: 3685 - DNA, 395 bp, Lilium asiatic
  Clone ID: LIB3230-011-P1-K1-B1
agggatttggccgactatctctggtcgctgcttctgccgctcaatctgctgctcttctcgcccaagctggtacgaaagagctgacatccaaggtgagggagggaggctatgaccaaaaggtgaatgaaactgtgactgtagttgcctcgaaaacgactgaaatcggccagaaaacatgggggatcatgaagggtgtcatggcaatggcatcacaaaaggttgaggaatacaccggtgaaggggcgtacaaaatggggggcaattggcatcagaatgagaacgggagaaatggttaccaacaagagactagtcaggagacaaaggcttggaactctgtacaggagaaaccaattaagaattatagttctgttagctcttgggatgactgggacgag

SEQ ID NO: 3686 - DNA, 395 bp, Lilium asiatic
  Clone ID: LIB3230-011-P1-K1-B2
agggatttggccgactatctctggtctttgctttttacgatcattctatcgctgttctcgcccaatctggttcgaaagagctcacatccaaggtgagggagggaggctatgaccaaaaggtgaatgaaactgtgactgtagttgcctcgaaaacgactgaaatcggccagaaaacatgggggatcatgaagggtgtcatggcaatggcatcacaaaaggttgaggaatacaccggtgaaggggcgtacaaaatggggggcaattggcatcagaatgagaacgggagaaatggttaccaacaagagactagtcaggagacaaaggcttggaactctgtacaggagaaaccaattaagaattatagttctgttagctcttgggatgactgggacgag

SEQ ID NO: 3687 - DNA, 314 bp, Lilium asiatic
  Clone ID: LIB3230-011-P1-K1-B6
gagctggtaaacctatctggttgcccggaatttgtcgtcggcgctgtcgggttgccgtgatgccgggcctcaatgtgaccccgtgttcccacacgaccattctagcgcgaggacacgtgtcatttgtaaagcatgttggttcctggaatctcaagtgccaggtcaagaacaggtaccacaggatgaggcacatggaggacgctgcgatgtgttcatgataggtctaggtcggcgtttaccattcaactttgggttgctggaccggtggcgtcttatagatgtaattatttaatcattttgtatagaactcctgc

SEQ ID NO: 3688 - DNA, 299 bp, Lilium asiatic
  Clone ID: LIB3230-011-P1-K1-B7
gaagtataggagcattggatccagggccctgcgcattgtagtgctatgcttggctagtccggccaggttgtgaatacaaatatgagaccacacctgcggagattcacgctcctgtcttgtaaatgcagaacaatctctagtctatggtcggggcctaatggccatattgttgggaccaagatcgtcaccaatcattgcaccaactggtgcttcagacctaactactttattaacccatttatggtgtgacccgggcctttgatcagcaccatctttgtctattcgataatttgttcaag

SEQ ID NO: 3689 - DNA, 390 bp, Lilium asiatic
  Clone ID: LIB3230-011-P1-K1-B8
ggggagtgggaggctcccaagattgacaaccccaagtgtgaagtagcaccgggttgtggagaatggaagaggccaatgaaggcgaacccagcgtacaaagggaaatggaatgctcctctaatcgataacccgaactacaaaggcatctggaaaccacaggagatacctaatccggactattttgagctggacagacctgactttgagcctgttgctgctattggtattgagatttggacgatgcaggatggtgtgttgtttgataatatcttgatagccagtgatgagaaggttgcagagacgtaccgtgagaagacatggaagccgaagtatgatgctgagaaagaaaagctgaaggccgaagaagcatctagcagtctttctgatgga

SEQ ID NO: 3690 - DNA, 375 bp, Lilium asiatic
  Clone ID: LIB3230-011-P1-K1-B9
cccacgcgtccgcccacgcgtccgcttcagcgggttttcgagttgaagtatttaccttgcgtctgtcgtaactcactgacattgaggctatgaagtcttatatttggctccaaactgtggatggatcaatccagcaagttgaagaggaggatgcaatgtaatgccctatgatttgccgagaggtactacagaccggcatggggtcctctaagacctatgctatttctcttcctgagagagttaatccagccgtcctgggtttgatacttgattactgccggtttcatcaagtacccggtcattctaacaaggagcgaaaatcctttgatgagaagttcatcaggacagatgtcgaccaattatgtgagttggcat

SEQ ID NO: 3691 - DNA, 379 bp, Lilium asiatic
  Clone ID: LIB3230-011-P1-K1-C10
gctccccttccagaacatgacggccgtccaagcagcatttgctgtcgtcaacaggggatttcgcccgatcgttccgcagggctgcctccctgtgctaggcgaaatcatgactcgctgttgggacgcaaaccccgatgtgcgcccccctttcactgaggttgtcaggatgctggagaaagctgagatagagatcatgagcacagtccgcaaagcacgctttcggtgttgtatggctgagccgatgaccaccaattgatacaatgttaatgaagtgctcgaaaatgaaagacaggctctgtgtatttattgtatggacagaccgtctgtggttgtgtatgtgggtttatcttttgtggtcatgttagtgtactatggttac

SEQ ID NO: 3692 - DNA, 282 bp, Lilium asiatic
  Clone ID: LIB3230-011-P1-K1-C11
gctccccttccagaacatgactgccgttcaagcatcatttgctgacggggacaggggatttttctcctatcgtcccccatcgcaacctcactgagctaggcgaaaatcatgactcgatgtttggactcaaacccaaatgtgcgccctcctttcacttttattatcatgaacctttagaaagctttgatagtaaccatacgcacatcccgcatagcacctctttaaatagtttttatagcttataccaaattaccactcaaattgattacaatgattatttat

SEQ ID NO: 3693 - DNA, 382 bp, Lilium asiatic
  Clone ID: LIB3230-011-P1-K1-C12
gctccccttccagaacatgacggccgtccaagcagcatttgctgtcgggaacggggggattttttccctttcgttcctcaaggctgcctccctgtgctaggcgaaatcatgactcgctgttgggacgcaaaccccgatgtgcgcccccctttcactgaggttgtcaggatgctggagaaagctgagatagagatcatgagcacagtccgcaaagcacgctttctgtgttgtatggctgatccgatgaccaccaatcgatacaatgttaatgaagtgctcgaaaatgaaagacaggctctgtgtatttattgaatggacagaccgtctgtggttgtgtatgtgggtatatactttgtggtcatgtttagtgtactatggttac

SEQ ID NO: 3694 - DNA, 369 bp, Lilium asiatic
  Clone ID: LIB3230-011-P1-K1-C5
ggaacacaatgtcgtcaatcactcttccaactgcctgtctgctccgaagcagcatcaaatatccagagagcaaaatgcttatgaaggccccttcatccctcacctccttgaggagcatctctaaaccttctcggctgaagtcttcaaatggcttcagggcttctgcaatggctgcctacaaggtgaagcttgttgggccagaaggggaggaacatgagttcgaggccccagatgacacatacattctggacgcagctgagcttgcagggttggagctgccatactcttgcagagctggggcttgctcaacctgtgctggtcacatggtgtcaggtgctgttgatcagtcggacggatcattcctcgacg

SEQ ID NO: 3695 - DNA, 377 bp, Lilium asiatic
  Clone ID: LIB3230-011-P1-K1-C6
tgggtgagtgaacttgtgagctgcagcagattcggaatgatgaggcctcttttctgcgggaacttcgagcacgacactcggcactcggatctggagcggctcttcagcaagcatggaagggtggatcgcgtcgacatgaaatctggttatgcttttatatatttcgaggatgaacgtgatgctgaatctgcaattcgcaatcttgacaatgtgccttttggtcatgataggcgtaggctgtctgttgaatggtcgaggggggaacgtggaccacgtcatcgggaaggctctcggtcaacagggaatacgaagcccaccagaacactgtttgttataaactttgacccaatccgaacacggtctcatgacatcgaaag

SEQ ID NO: 3696 - DNA, 378 bp, Lilium asiatic
  Clone ID: LIB3230-011-P1-K1-C9
cccacgcgtccgatctccaccgtatattggttggagagtccatccaagataaattcgagcataaccggaggcttagaaatccagccaccaccgcagtccaacaagctatacatgggcttgcatacaccgtctatggcaagcctgatgtgaggcgtctgatgtttgaggtctttgattttgagcaggtccaaccgaaagaggtatgaggccagaatgttcttgcttcttgctcaattcttcccagtggaatatcatacaccaatgtgaggaaagcatcctttctactgttttctgatcctagtgtatgtatgatagttaagatgtgcatttgaattgttgtacagctttcatatctggatattggaaacgtgagcaacc

SEQ ID NO: 3697 - DNA, 396 bp, Lilium asiatic
  Clone ID: LIB3230-011-P1-K1-D1
caccgagtcctcagtttacagaggagaagagatggacgctgccaagacgaccaagggcgctgctgggcggaagggtggtgccaagaagaagtcagtcccgaagtccgtcaaagccggcctccaattccctgtcggccgcatcgcccgctacctcaagaagggtcgctatgcaaagcgtgttgggtctggagctccagtctaccttgctgcggttctcgagtaccttgctgctgaggtgctggaactggccggcaatgctgctaaggataacaagaagtcccggatcatccccaggcatgtgtgtctggctgtgaggaatgaccaggagttggggaagttgcttgctggagtgacgattgcccatgggggtgttattcccaacattaacccagtcct

SEQ ID NO: 3698 - DNA, 347 bp, Lilium asiatic
  Clone ID: LIB3230-011-P1-K1-D11
cacgaaactctgattctcagaaatcatcatagaatgaccattgaaactcaattctaaaccaataattaacttgatccaactctaattagcaactgccaatccgagctccaaaatgtcaagttgacaagacagtaaactacatatccatacgacagttaaacccaagaaatctcagaaagacatcattgttaaacccaagaaatctcagaaagacatcattgaaaatatactgaatatgtaaaaccaacatacatcaatttatacgaacccaaaaattctcaattttcatcataaaaatgaaatgaatcaatgattaacatgagaatgatcaacttggatgtagtgat

SEQ ID NO: 3699 - DNA, 315 bp, Lilium asiatic
  Clone ID: LIB3230-011-P1-K1-D12
cacgaaactctgattctcagaaatcattatataatgaccattgaaactgcaattgtaaaccaataatttacttgatccaactctaattagcaactgccaatccgagctccaaaatgtcaagttgacaagacagtaaactacatatccatacgacagttaaacccatgaaatctcataaagacaatattgttaaacccatgaaatcttataaagacattattgaaaatatactgaatatgtaaaaccaacatacatcaatatatacaaacccaaaaattctcaattgtcattattaaatatgaaatgaattcaatg

SEQ ID NO: 3700 - DNA, 122 bp, Lilium asiatic
  Clone ID: LIB3230-011-P1-K1-D2
ccacccacaaagacaccctatcaggaacccagaaagcgctctcaggatgattattacatgggcataggcgctgaacccggagaagtggaagccgaatttgctcgtcttggttctgcatagga

SEQ ID NO: 3701 - DNA, 397 bp, Lilium asiatic
  Clone ID: LIB3230-011-P1-K1-D4
gacggcgagctcatgctctccgtcgaacggttgcaggagatccaagacgagctcgagaagatcaatgaggaagcgaacgaaaaagttttggaggtggaacataagtataacgagatacgcagacctacctacaaaaggcgcaatgagatcatccaagctattcctgacttctggttaactgcgtttttgagccatcatgctattgctgatcttatcactgaggaagaccagaaggtattgaagtacatggtttcgttggatgtggaagattttaaagaagacaagccaggctactccattacatttaattttgccaataatccttatttcgaagatgcaaaacttacaaagacattgttattctcggacgaagggtcagtagatattactggcacaa

SEQ ID NO: 3702 - DNA, 373 bp, Lilium asiatic
  Clone ID: LIB3230-011-P1-K1-D7
ggggcctgtgcatgttgaggccggataaggtgcgggcgctggtgaacctgagtgtggcatacaggcctcggaaacccgctctgaagcctgtgaaggcgctcaggatgctctatggggatgattattacatgtgccgattccaggaacccggagaagtggaagccgaatttgctcgtcttggttctgcattggtactcagaaagtcgctaacttatcgcactccaggtcctcttttcataccaaaggaaggctgggattcgcctgacgctcaaataccattgccttcctggttgtctgaggaagatatcaactattatgctagcaaatttgagaagtctggttttactggagcattggattattaccgagcatt

SEQ ID NO: 3703 - DNA, 387 bp, Lilium asiatic
  Clone ID: LIB3230-011-P1-K1-D8
gcaagctgaaaagatgaaaagccctcctcaagctaccgtccgcagattggaatctgtggagtcagtaactgaccagatacatagcctctctattactccgacagttgaggttccaggcccttccaaagattcaagagagagttcaatgcctggggattctggtccagatcttgagaagagaatccgtgctctaaaaaagaagattcggctcgcagatgcgcaagtcaaaggtgaccaacaacatacgaaggcggagcagacggagaagatggcaagagtggatgggtggcgtgaggagctgaaacttttggaagacggaaaggcgaagatgctctcttgattctttgcatcaattctctctcggtcacactcagattgtgatgtgat

SEQ ID NO: 3704 - DNA, 392 bp, Lilium asiatic
  Clone ID: LIB3230-011-P1-K1-D9
gtcggacgcatcacagatgattcctcaacataattacaagcttgatgctcatgctttaaatagccgtcatcctggagagtttgaatgcagagaatttagagaatcaattcttggagtgatgcctcatcattgggataggagagaagatacatctttcgagctatcacacttcagaaggcacaaacgcaaaacgttgaagaaaatgcctgggaaagttatgacaagcgtttaccataaacccgtggaaaacaatccccctgggaaagattcatcaaataaaattgcaagtttaattgataaagctgcaaatttggctggttcaacaaaatctaggaagaagtaccattatattcctactataactaataatacacaactttggtgggttccaa

SEQ ID NO: 3705 - DNA, 365 bp, Lilium asiatic
  unsure (1)..(365): unsure at all n locations
  Clone ID: LIB3230-011-P1-K1-E1
ttgcgcacgattacgcgcaggccgggctcgtcgcgctgacgcgcgcgctccagtgcagcgacgccgcctatgcggacgcggtcggcctgttccagcaggtgggttttcgcgtcgtcggtgtcgcggacgtgccggggatggtcgtgatgcgcaccgtcgcgatgcttgcgaacgaggcggccgacacggtcaaccagggcgtgtgctcgcccgccgatctcgatctcgcgatggagaagggcgtgaactacccgtgcggcccgcttcggtgggccgatgcgatcggcatcggccgcgtgcatcgcgtgctgtcgaaccnctgggcgagctacggggaggaccgctatcgcgtgtcgccgcgcctc

SEQ ID NO: 3706 - DNA, 116 bp, Lilium asiatic
  Clone ID: LIB3230-011-P1-K1-E11
cgaatattatctgaaacctaggttgaaacatgtgaatatattttatgatttggaattgatggattaattttagttcttataatcttgatatgattattaaaacctggttaaaacgt

SEQ ID NO: 3707 - DNA, 392 bp, Lilium asiatic
  Clone ID: LIB3230-011-P1-K1-E12
ccgggattgtagatgctttgttctagtattttttagaatcacgtgttggtgtcggtgcttctagattatcagcatggatgtgcaactgggcaaataatccgggattgtagatgataagctctcttttgtaaattgtaactttctccttgtatcgagatataatgaagttatttacctttaattttttttttaaaaaaatcaccccaacaaactggacatatttctcataaatgaagaaatggaagatacatggcatagtgagtgctcttccaagaataacggctgatcactcctttgttgctagaagcaggagagaggattcatccacccattcgaattcttcctatcattgtacagagttcctgattgagattgcagaatgataagttggt

SEQ ID NO: 3708 - DNA, 324 bp, Lilium asiatic
  Clone ID: LIB3230-011-P1-K1-E2
ttgcgcacgattacgcgcaggccggtctcgtcgcgctgacgctcgcgctccagtgcagcgacggggcctgtgcggacttctgtcggtctgttccaacaagtgggttttcgcgtcgtctgtgtcgcggacgtgccggggatggtcgtgatgcgcaccgtcgcgatgcttgcgaacgaggcggcctgacacggtcaaccagggcgtgtgctcgcccgccgatcttgatctctggatggataatggcgtgaactacccgttcggaccgttcgcgttgggccagatacgatctgatatttgctctagtaacatatcgtgttcttttac

SEQ ID NO: 3709 - DNA, 389 bp, Lilium asiatic
  Clone ID: LIB3230-011-P1-K1-E7
ccgggattgtagatgctttgttctagtattttttagaatcacgtgttggtgtcggtgcttctagattatcagcatggatgtgcaactgggcaaataatccgggattgtagatgataagctctcttttgtaaattgtaactttctccttgtatcgagatataatgaagttatttacctttaattttttttttaaaaaaatcaccccaacaaactggacatatttctcataaatgaagaaatggaagatacatggcatagtgagtgctcttccaagaataacggctgatcactcctttgttgctagaagcaagagagaggattcattcacccattccaattctttctatcattggacagagttcctgattgagattgcagaatgataagtt

SEQ ID NO: 3710 - DNA, 375 bp, Lilium asiatic
  Clone ID: LIB3230-011-P1-K1-E8
ccgggattgtagatgctttgttctagttttttttagaatcacgtgtaggtgtgggtgcttctagattgtcaggagggatgtgcaactgggcaaataatccgggattgtagatgataagctctcttttgtaaattgtaactttctccttgtatcgagatataatgaagttatttacctttaattatttttttaaaaaaatcaccccaacaaactggacatatttctcataaatgaagaaatggatgatacatggcatattgagtgcttttccaagaataacggttgatcactcctttgttgctagaagcatgataagaggattcatccaaccattctgattcttcctatcattgtacagagtccttggttggaatt

SEQ ID NO: 3711 - DNA, 328 bp, Lilium asiatic
  Clone ID: LIB3230-011-P1-K1-E9
cccacgcgtccgttttttttttttttttttttttttttttttttgaattgttgggtttttttttttaaaatagatttaacaaaagatttttttgaataattgttttgtgggggaagaaaaaaaaaagagtttaaaaaacaaaaaaaaaaagataatggaaaaaagatggaactttgttgagggaagaaaaagggaggatgaggaaagaaaggaaaatccggaaaaaaaaagatggggggactttggaaggggatggggggataaaaattgggttggggggggaaaaacggaaaaaaatggggggtggaccacggaaaaaaaatggggg

SEQ ID NO: 3712 - DNA, 395 bp, Lilium asiatic
  Clone ID: LIB3230-011-P1-K1-F1
gaagcccagaaggagagtgaagccgaactgaacgatctacttgtttgccttggtcaggagcagaccaaggttgagaagctgagcacgaggctggcagagctgggtgaggatgttgacactctccttgatgggataggggatgatactggactaccagatgaaggcgatgatgatgaagatgacgacgaagagtgagctctagtattttctcttctgcttcctcagcccgctgttgattgcatatcttcacacttaaggcttgagagtaagttaggcaagtttgctctgacaaagagcatggggtgtctcaattgtacatattggacagcacaaccaaccgtatcttactttatgttaatgtaacggtttaaaaactgtaatttgtgatttgggta

SEQ ID NO: 3713 - DNA, 393 bp, Lilium asiatic
  Clone ID: LIB3230-011-P1-K1-F10
gcctaccttgattggttacagcgcccagggtgcttgcaagtttgggttctatgagttcttcaagaagtactattccgacattgctggacctgagtttactgctaaatacaagaccctgatctaccttgctggctctgcttctgctgaagtgattgctgatgtagctctctgccctatggaggcagtaaaggtgcgtgtccagactcagcctggatttgctagagggttgagtgatgggttccctaagtttgtcaagtctgaaggatacggagggctgtataaaggactagttccactttggggtcgtcaaattccttataccatgatgaagtttgcatcttttgagactattgtggagatgatttacaagtatgccatgcctgttccgaaaga

SEQ ID NO: 3714 - DNA, 393 bp, Lilium asiatic; identical to SEQ ID NO: 3713
  Clone ID: LIB3230-011-P1-K1-F11

SEQ ID NO: 3715 - DNA, 395 bp, Lilium asiatic
  Clone ID: LIB3230-011-P1-K1-F12
cttgggtaaagtacaaaaggaaaaaaataataacagttgcgggcttgaatattaaaggggttccacctttaatggaggatttagggaatctcaaaagttggatgttcttagtagcacatccagtgaaactcaaaaataacatgagttgattgcataccttcgatgtaataggggttctaccttttatggtgaatcaggggaatttcaaaagttggctatttctaatgatgcaactgggaaatcacaaaaggaacaagtcttggataggatttcatgttaatgggggatttgggaatcgttgccaagttggtatttggccttggggcaattaaaagtcaactaaatcacgtttattgttggatgtgactcttcatgcctctcagttatccaaatgt

SEQ ID NO: 3716 - DNA, 391 bp, Lilium asiatic
  Clone ID: LIB3230-011-P1-K1-F2
gaagcccataaggagagtgaagccgaactgaacgatctacttgattgccttggtgaggggcagaccaaggttgttaagctgaccaccaggctggcagagctgggtgaggatgttgacactctccttgatgggataggggatgatactggactaccagatgaaggcgatgatgatgaagatgacgacgaagagtgagctctagtattttcttttctgcttcctcagcccgctgatgattgcatatctttacacttaaggcatgagagtaagttaggcaagtttgttctgacaaagagcatggtgtttctcaattgaacatattggacatgtcacccaaccaaatcttaccttatgtttatgtaacgtgttaaaaactgtaatttgtgatctt

SEQ ID NO: 3717 - DNA, 395 bp, Lilium asiatic
  Clone ID: LIB3230-011-P1-K1-F4
atgctgaggctgaaaactgtaacatagaaatctcaaaaggcaactggctcaatctgctactactatatgactgaattctttcaccattattctctatagttttcttctcttgtatttgttggcagggagaaagtgaagctgatgattgttccttcctgggatcaataatgccatcatacatagggatctcagtattcatatcaattttaataccatccatggtggttttagggttacctttgatggctgacattggttcatcttcaccgttggactcctccacagtaccatcatcaactggatcgtcttctgaacctctatcatctcctgtccccatgctctttctcttgaggtggtcgtataatggaatgttcttcggttttacgatcttcttc

SEQ ID NO: 3718 - DNA, 346 bp, Lilium asiatic
  Clone ID: LIB3230-011-P1-K1-F5
atgctgaggctgaaaactgtaacatagaaatctcaaaaggcaactggctcaagggggctggtactatatgactgaattctttcaccattattctctatagttttcttctcttgtatttgttggcagggagaaagtgaagctgatgattgttccttcctgggatcaataatgccatcatacatagggatctcagtattcatatcaattttaataccatccatggtggttttagggttacctttgatggctgacattggttcatcttcacccgttggacttcttcacagtaccatcatcaactggatcgtcttttgaacctttatcatctactgtccccatgcttttt

SEQ ID NO: 3719 - DNA, 215 bp, Lilium asiatic
  Clone ID: LIB3230-011-P1-K1-F6
ggctgtggctgaaaactgtaacattattatcttaaaaggcaaccggctcaatgtgcgggtactattttactgaattctcccaccattattccctatttctatccactcttgtattatgttcgcactgagaaagtgaattctcctaatcgatccttcctggaatcaatcatgccatttaacataagtatctcacgattcatatcatttttaatacc

SEQ ID NO: 3720 - DNA, 389 bp, Lilium asiatic
  Clone ID: LIB3230-011-P1-K1-F7
cttgggtaaagtacaaaaggaaaaaaataataacagttgcgggcttgaatattaaaggggttccacctttaatggaggatttagggaatctcaaaagttggatgttcttagtagcacatccagtgaaactcaaaaataacatgagttgattgcataccttcgatgtaataggggttctaccttttatggtgaatcaggggaatttcaaaagttggctatttctaatgatgcaactgggaaatcacaaaaggaacaagtcttggataggatttcatgttaatgggggatttgggaatcgttgccaagttggtatttggccttggggcaattaaaagtcaactaaatcacgtttattgttggatgtgactcttcatgcctctcagttatcc

SEQ ID NO: 3721 - DNA, 388 bp, Lilium asiatic
  Clone ID: LIB3230-011-P1-K1-F8
cttgggtaaagtacaaaaggaaaaaaataataacagttgcgggcttgaatattgggggggttccacctttaatggaggatttagggaatctcaaaagttggatgttcttagtagcacatccagtgaaactcaaaaataacatgagttgattgcataccttcgatgtaataggggatctaccttttatggtgaatcaggggaatttcaaaagttggctatttctaatgatgcaactgggaaatcacaaaaggaacaagtcttggataggatttcatgttaatgggggatttgggaatcgttgccaagttggaatttggccttggggcaattaaaagtcaactaaatcacgtttattgttggatgtgactcttcatgcctctcagttatc

SEQ ID NO: 3722 - DNA, 381 bp, Lilium asiatic
  Clone ID: LIB3230-011-P1-K1-F9
gttaatgatggggagaagaaaagcaatggtaaatccattcgtgctgaagaggatacaaaatcttctaagaagaatgcccttccaagtattcctgccgagaagccatctctgaagacgagaccacaagatgattcagtgaggccgtctgatgatctgcagaacaagggttctactggtacgaggaagcggaaaatcggttctcttgatggggattatggcaacgaattatttcagtcgaagaaggttccttctgaaaaggtgaatgttggtgagaaaaaaacattgcctgatgtttcagcaaaaatgaacaaggatgctaacacttataatgagaccgtggaagttaccagaagaccagtgacggatagaagcaagtggttt

SEQ ID NO: 3723 - DNA, 335 bp, Lilium asiatic
  Clone ID: LIB3230-011-P1-K1-G10
gaagtaatgaatcaaatgaaggcagacatgattgaattcttcaagcgggcggtgtaagagtatttattttttatacacaattaccaaatagtcccgaagcctatggtcaaaccttcgttgcctccaaggaccaaaaactctattgggcggacatgttctacttattaacttgaccggtagccacacgaaatatggaactttggccttctacccctacaactttcaatgaaacattatataaatactcatcgtagctgaagaaactcttctttattctgtggaattttattgctattaaccataaggcggatccggaggttctcttaaattttttt

SEQ ID NO: 3724 - DNA, 396 bp, Lilium asiatic
  Clone ID: LIB3230-011-P1-K1-G2
gctgtttggtcacgggtgagtatggatggacggccaacatggagaggattatgaaggcccaagcgctgagggactccagcatggctggttacatgtcaagcaagaagaccatggaaatcaacccggagaactccatcatggaagagctgaggaagcgggctgatgctgacaagaacgacaagtcagtcaaggaccttgtgttgctgctgtttgagactgcactgctcacctctggtttcagcctcgatgagcccaacaccttcggcaacaggattcaccgcatgttgaagcttggcctcaacattgacgatgatgaggtatcagccgatgctgcggacactgagatgcctcctcttgaggaggatgctgagggaagcaagatggaggaagtcgatt

SEQ ID NO: 3725 - DNA, 387 bp, Lilium asiatic
  Clone ID: LIB3230-011-P1-K1-G3
gtcgctgttgtgccagattcccgggtggtggagagttgtgacagaagcctcacaaaacgtctggtgaacatgttgggatcaatatctgcacctcctgcttatgctgcagaaccaacttcttctagcaaatctgtgggacgtatgtctgcaactaattctgcaagctcttccatccacgtcactgctgggatgattcagattcgtggttttgaagtgatgggcagggccgagcactggtccatgcatagaaatggagacatgggttttctcctttcatgcggtgtggcatctaggaagtctgatgatgggtttgagaccgttccaaaaatcaggggctggtctatggccgtggtactgcgtggtgggttatattgcttcttactctct

SEQ ID NO: 3726 - DNA, 356 bp, Lilium asiatic
  Clone ID: LIB3230-011-P1-K1-G4
gtcgctgttgtgccagattcccgggtggtggagagttgagacagaagcctcaggaagcgtatgctgttcatgttggcatcaatatctgcacctcctgcttatgctgcacaaccaacttcttctagcaaatctgcgggacgtatgactgcaactaattctgcaagctcttccatccacgtcactgctgggatgattcagattcgtggttttgaagagatgggcagggccgtgcactggtccatgcatagaaatggacacatgggttttctcctttcatgcggtgtggcatctaggaagtctcatgatgggtttgagaccgttccaaaaatcaggggccggtctatgtccgtggtact

SEQ ID NO: 3727 - DNA, 313 bp, Lilium asiatic
  unsure (1)..(313): unsure at all n locations
  Clone ID: LIB3230-011-P1-K1-H3
aaaaaaaaaaacaaaaaagagnaaaaaaaaaaaacaaaactaaaaaaaaaaaaaaaaaaaaaaaaaaaaaaaaataaaaaaaaaaattaaaaaaaaaaaaaaaaaataaaaaataaaaaaaaaaaaaaaaaaaaaaaaaaaaaaaaaaaaaaataataaaaaaaaaaaaaaaaaaaaaaaaaaaataaaaaaaaagaaaaagaaaaaaaaaataaaaataaaaatcaaaaaaaaaaaaaaaaaaatttaaaaaaaaaaaaacaaaaaataaaaaaaaaaataaaaaaaaaacataaaaaaaaaaacaaaaaaa

SEQ ID NO: 3728 - DNA, 288 bp, Lilium asiatic
  Clone ID: LIB3230-011-P1-K1-H4
gtccgatctagccatcaccatgagcagcatcgtcaccggctacgacctctccggcacgaccttctcttctgacggccgggtattccagatcgagtacgccgccaaggccgtcgacaacagcgggactgttatcgggatcaagtgcaaggatgggatcgttctgggcgtggagaagctgatcttgtttaagtattattcttgctgggtttcgtattgtcttggttgcttatgattttaattgttgttattttttgactattaattatatatttttgtttattattttat

SEQ ID NO: 3729 - DNA, 362 bp, Lilium asiatic
  Clone ID: LIB3230-011-P1-K1-H5
ggaaaggagcaaatggcttttgacttgtatcgtgctgccacaaacatttttctcaaacttgaaaagtatgccgatgctgcagcatttcttttaagatggggtttagctgctgataagtgcaatgctgttaacagccaatgcaaggcttatctgagtgcaatcatagtttatctttatgctcatgatttgaagcaagcccagaaatgctacaatgattgttcccagattggtgcctttgttaacagtgaccaataccgttctgcaagcaagtttctatctgcttatcaagaaggtgatgctgaagaaatcaaacgcgttgcacagtctagcaccatttcaaatctggatcatatgattattag

SEQ ID NO: 3730 - DNA, 386 bp, Lilium asiatic
  Clone ID: LIB3230-011-P1-K1-H7
tctttctcgacactgggctcgacacttcagtagtctggcaggccaggggcctgtatagcattcgattttcactccccaaacccttccaatgcatccggtgagggagctccaagagcggtgccagcaacaagccgagggtttagagtacaaagcgagtcgagttggcaatgttgccatggtggaagttttcgtcgacggggttcagattggagtagcgcataattcacaaaagaagatggcgcaaaatcttgcctgcaaggaatgctctttccgccttggtggagaaggagaaggagaaatagagcccggctactaaagatggagatgattggaagaaaaatggcgattgacatgttttcaccaggcaaacgctcaacgacatatgc

SEQ ID NO: 3731 - DNA, 348 bp, Lilium asiatic
  Clone ID: LIB3230-011-P1-K1-H8
cagtaattgtgtaggctttgcaaattacaaggccttcatcattttcatcttccatgcagccattggctccatctactccacggtgatattttgttgcagtgtcactcagaaggatcatgaaatccaaaaaaggtccgtcaagctatattatggggcttaagcttgacgatgggcagtctattggcttggcacatatatctcctgattcataacatgacaaccatagagtatcgagagggagtaagagcaaagtggctagctaggaagagcggtcagagttatcgccatccttttgaccttggagtatatagcaatctcatttcggttttagggccaagtatgatgaaa

SEQ ID NO: 3732 - DNA, 386 bp, Lilium asiatic
  Clone ID: LIB3230-011-P1-K1-H9
ctcggtgaaggagaggaggaggaatgtttcgactatcatcgagactatggataaagtgtacaatctggactggtacagtagtgcgtcgaaaaatgagtgcacggctgccgcaggcttcaagtggatgcttaatcagggtctcatggagcatcacaaagaaattgtcgaatatttcaatcgtagaaatgtttatgccatattcctctttagaaggaatttactccgtcggttggtctcactcctagcaaatgatcacgatcgaggtgccaaacaattgaatggcacacataaagctcatgtacactccaaaaatgaggcaaatgtactcgcaaaatacaaaccaattatcaatgctacactactgattcccactttatgacacacgg

SEQ ID NO: 3733 - DNA, 412 bp, Lilium asiatic
  unsure (1)..(412): unsure at all n locations
  Clone ID: LIB3230-012-P1-K1-A1
agagattccaataacttctctctctctgttaatacgattctgattctattttttctcaaccaatgggccacgaaacaaaggcgccgacggagaccaccaccaccctcgtgttctcgtacggaactctgaagagaggattctccaaccacgtcctgatgcaagatctgatccgatccggcgacgcttctttcaaaggagtctaccaaaccttagagaagtaccccctcgtctgcggaccctaccgagtccctttcctgctcaacaagcctggatcgggtcaacgcgtcacgggagagctntactcggtctctccccgcggtctctcgcgtatcgacgagctcgaagggatcagccggggccattacgtcagacaaccgatccgtctcgccgcgaaagaagagggcggagatct

SEQ ID NO: 3734 - DNA, 389 bp, Lilium asiatic
  Clone ID: LIB3230-012-P1-K1-A10
aaaggattgatttttacaataaaggttgacgattttgttataccttgtacgaagaggtgatgaagaaggttgcacagatggaggcagacagagacagaaagagaaagcagcgaagtgaagtatagagagagaggcttggagtggtgactccaaattaaggcacgtttcttctgactccaaattaagcgacggttcttcttttaattctcattttttcttttcttttaattctaattatggttaagaaccctcttaagatacatggttaatggtgctcttaggccgggatccttgctttctttttgtgccgtctcaaattaatatatcactaaaatccagacatgtatgtcgaacgctggtaagtcgtaacacatagtatagtcttaaca

SEQ ID NO: 3735 - DNA, 373 bp, Lilium asiatic
  Clone ID: LIB3230-012-P1-K1-A11
cccacgcgtccgcttgagttgattcccctacttgagtttcactttgctgtgcttgtggttgtgtatcttctaaatttttctcagctagagcatcttcttcattcatgtctattaactgatccatgctgtaactaaagaacaaaaatagattttcttagtcaatctagattctagcacaatctaaaataactcatgtatccacgtactggaaaaagacacatcaaacatcaatcaaacaggcgaagagtaatgatcaagatgtcaatatctcagcctctcaggtttatacatgaatcatgaattcacacaatgtttcgtagagaaaagcaacaagaatagattttttaatcaatctagattctagcacaatcac

SEQ ID NO: 3736 - DNA, 391 bp, Lilium asiatic
  Clone ID: LIB3230-012-P1-K1-A12
caacagtaaacaaatctctttttggtgagcttccagtgatcgcaaaaaacaatggcgaaggaagtgatccttcttgatttctggcctagcatgtacggcatgaggacaagaatcgcgctgagggagaaaggtgtcgacttcgagtacagggacgagaatctgagggagaagagccctctgctcctccagatgaacccggttcacaagaagattccggttctcatccacaacggtaaaccggtctgcgaatcagccatccaggttcagtacatcgacgaggtgtggcctcacaagaaccctatcctcccttctgatccttaccagagagctcaagctaggttctgggttgatttcatcgacaagaagatgtacgaggcacagaggaaggtgt

SEQ ID NO: 3737 - DNA, 409 bp, Lilium asiatic
  Clone ID: LIB3230-012-P1-K1-A2
agaagcgcttacgacttaccagaccatgttgaacacgttggatggtgttagggacgagacgggagctagtcctactccttgggcggtgtggaccagggcgtggactgctgaagagaataggcatggggatttgcttaacaagtatctttatttgtctgggagagttgacatgaggcagattgagaagactattcagtaccttattggctctggaatggatccaaaaactgaaaacaacccttacttgggtttcatctacacttcctttcaagaaagagcaaccttcatctcccacggaaacactgccagacacgcgaaagatcttggagatttgaaacttgcgcagatatgcgggaccattgctgctgatgagaagcggcacgagactgcttacaccaagattgtggag

SEQ ID NO: 3738 - DNA, 391 bp, Lilium asiatic
  Clone ID: LIB3230-012-P1-K1-A3
atggaagcgactcaagaacatatgacaatgaagggaggtttatgccggtgaatcttgagttgatatttagcaaatatgcgaaaacattgccagacaagttgagtcttggagaattatgggagatgacacaaggacaacgtgacgcatgggacatcttcggatggttcgcaagcaaaatagagtgggggttgttgtacttgctagcgagggatgaagaagggtttctgtcaaaagaagcgattaggaggtgttttgacgggagcttgttcgagtattgtgccaagatatacgcaggtatcaatgaagacaagacagcctactactaaaagtaaatggtagaggagcttcgtcgatgtgaatgtaaattgggactaaagcaaagtccatgtgt

SEQ ID NO: 3739 - DNA, 392 bp, Lilium asiatic
  Clone ID: LIB3230-012-P1-K1-A4
cttgtctcatcatcatctctctatcaacaatggcgattcgttccgtagccagcagaaaaaccctagcgggcctaaaggagacatcttcgaggcttcttggtctccgatcaatccagaccttcacgcttcctgatctcccctatgattacagcgccttggagccggcgatcagcggcgagatcatgcagatccatcaccagaagcatcaccaggcgtacgtcactaattacaacaatgccctcgagcagctggatcaggccgtcaacaagggagacgcttccggcgtcgttaagttgcagagcgccatcaagttcaacggcggaggtcatgtgaaccactctattttctggaagaatcttgctcctgtcaaggaaggtgggggagagccacca

SEQ ID NO: 3740 - DNA, 393 bp, Lilium asiatic
  Clone ID: LIB3230-012-P1-K1-A5
aaactggcaacgttaaggtgcctgtggctttagttggtgagtctggcaactttgcttcgtggctgtacattgcagctgtgaaaatgaattccttggaaaagattgagtcggatctttctgagttggttgaggctatgaagacaagtcctattttctcacagtttactaaggatccctctgttcctagagagacgagactggctgctattgtcgatgtttgtgataaagcaaagtttgcagaacccaccaagaacttcctctctttgttagcggagaatgggaagctgaagaacctagacgtgattgtgaaaaaattcatgcagctaacaacagcacataggggagacgtcaaagtcttggttaccactgtcatgccgcttgccccttctgagg

SEQ ID NO: 3741 - DNA, 286 bp, Lilium asiatic
  Clone ID: LIB3230-012-P1-K1-A6
cccacgcgtccgctctccaccatctcgtctcccaaggcagaagaagaaccccatggcgatttacgtcgcatcacggcggctttccgccagaacaaccgcggcggcgctgcgttacgccactgctctgagatcttattcgacctcgttcagggaggagggggccaccttcggcccgatccaagttctttccgataggtgggggggagcccagacgcaaagatcgttgcagaactttaagatcggcggcaagcgcaagcgattgcccgagccaatcgtccgggctttt

SEQ ID NO: 3742 - DNA, 240 bp, Lilium asiatic
  Clone ID: LIB3230-012-P1-K1-A7
gcgcccacgcgttcagacgagataagagattcgctttaagtatagaaaagtaattaagtacctcctctgagttatcattatatatgaactgctgctggactgtccccaacttgaataactgtgaaaccaaaaaaaaaaaaaacacaatacgatcgatcagatgcaaatgggtctacacccaaatttaatcttcgaaaaagttcaaattaattaattgttcacctgagctgaagccagatc

SEQ ID NO: 3743 - DNA, 403 bp, Lilium asiatic
  Clone ID: LIB3230-012-P1-K1-A8
ggcggatactgctagaacccatgacgatatcaccagccgtgaccagtacccattgtgtgggccgagaccgagaccagtatccttacggacgatcagattaccagaccttcagccaagactactccaagactaggcagattgctaaagctgctaccgaagtcaccgctggagggacccttattgtcctctccagtctcacccttgtcggaacaggcattgctttgactgatgccactcctctgcttgttatctttagcccaattctagtaccggctctcatcaccgtagcactgctcatcactggctttctctactgtggtgggtatggcattgcagctataaccgtcttctccctggtctataagtacgcaacgggagagcacccacaggggtcagttaagct

SEQ ID NO: 3744 - DNA, 399 bp, Lilium asiatic
  Clone ID: LIB3230-012-P1-K1-A9
ggagcacttcgacgttctgaccaaatctggcgagaagaccggtgtgtccaaacccaggtcggagattcaccgagatggagattaccaccgtgcagttcacgtctggatctttgtggagagtactcaagagctgcttctccaactccggtctgatgataaagattcttggcctggtcaatgggacatctctagtgctggtcatatctcagccggtgatccatctcttttatcggcacagcgagagctggaggaagagctaggcataaaactcccaacagatgcctttgaaaagatattcgtctttcttcaagaatgtgtcacaaacaatggaaaattcataaacaatgagttcaatgatgtgtatcttgttacagttctgcatccaatcccattagacgc

SEQ ID NO: 3745 - DNA, 378 bp, Lilium asiatic
  Clone ID: LIB3230-012-P1-K1-B1
ctcctaccaacaaaaaaagtccctctctttctctagcgatcagccatggatgaagagtacgaagttattgttctcggtactggtctcaaggagtgcatcctcagtggcctcctctccgtcgatggcatcaaggtacttcacatggacaggaacgactactacggtggagagtcaacttcacttaatctcaatcagctgtggaagaagtttaggggagaagacaaggctcctgctcatttaggttctagcagagactacaatgttgacatgatgcccaagtttatgatggcgaatgggaagcttgttcgtgtccttattcataccgatgtgaccaagtacttgtcttttaaagctgttgatgggagttacgtcttcgtc

SEQ ID NO: 3746 - DNA, 311 bp, Lilium asiatic
  Clone ID: LIB3230-012-P1-K1-B10
caaagatgttgaaatcaatcaaatttggataagattaagagacccgctaggacatgtataatttcttgattagatgtgtatacctcacaggagataatacattttatggtggtgaaaagtcgatcactttgagacggatctatttttcaaagaataattaatttaacataattttaactttgttctatgaaaatataggagcctccggatcaaaaaattataatcattaaaaattgaacactttgagatataacatacgaaatcattaaaagtgttcactttttgatgattagaattcttatatttacaat

SEQ ID NO: 3747 - DNA, 389 bp, Lilium asiatic
  Clone ID: LIB3230-012-P1-K1-B11
cggacgcgtgggcggacgcgtgggcgccagattctcctcttgattgcgagaagatgagcaacgacaaagacaacttgaacatgtccggtctcaccgccgctcttaacgaggaggatcgagcaggccttgttaatgctctcaaggataagttgcagaatttggctggacaacactcggatgtccttgagaacttgactccggcagtcaggaagcgtgttgaggttctaagagagattcaaaaccaacatgatgaaattgaagcaaagttcttcgaagagagggcagctctagaagctaagtatcaaacgttgtatcagcctttctacaccaagagatgtgagattgtgaccggtgtggttgaagttgaaggtttacctgaggaagtgaaa

SEQ ID NO: 3748 - DNA, 389 bp, Lilium asiatic
  Clone ID: LIB3230-012-P1-K1-B12
agcgagggtgtccctcgtgtcctagcctgcttcagcaacaaccttctgaggcgtgagcctctcaagcttgtggatggtggagagtcacagagaaccttcatctacatcaaggatgccattgaagctgtcctcttgatgattgaaaacccagagagagccaatgggcatatcttcaatgtaggaaacccaaacaatgaagtgacagtaaggcagcttgccgaaatgatgactaaggtctactcaaaagtgagtggagagacagctattgagagtccaactgtagacgtgagctccaaagaattctatggagaaggttatgatgacagcgacaagagaatcccagacatgaccatcattaaccgtcaacttggatggaacccgaagacgtc

SEQ ID NO: 3749 - DNA, 373 bp, Lilium asiatic
  Clone ID: LIB3230-012-P1-K1-B2
acgaagatcggtccctttcatcgtcccttacctcctatttgaaaacacaatgtctgtcaccaagtttggagccatgatctctggtttgttcaagtttggaagctcttacgagtgggtggtcaccaagaagctagggagatcctccgaggctgatctgattgcctacgcagagtcagggtccttggttgagtcaacgaatattcaaagatcgtcgtctgattcgggtttaaccgagcttagcaagctaggagcggctaagaaagctgggaagactaaaagaaaccgtctgtacagaacagagattgctttggctttcatcctcttggctgcctcggtgagaagcttgttgtctgcgcaagggatacacttctac

SEQ ID NO: 3750 - DNA, 392 bp, Lilium asiatic
  Clone ID: LIB3230-012-P1-K1-B3
tcgctgcacttatgaaaggtcaagccgacacaataggcattgcgatgcgaagagctttacttggcgaaatagaaggaacatgtattacacgtgcaaaatctgagaacataccacatgactattctaacatagtcggtattcaagaatcagtacatgaaattttaatgaatttgaacgagattgtattaaaaagtaatctatatggaacgcgcaacgcgcttatttgtgtccaaggtcccggatatataactgctcgagacatagttttaccgccctctgtggaaatcgttgataatacacagcatatagctaccttaacggaaccaataaatttgtgtattggattaaaaatcgagaggaatcgcggatatagtttaaaaatgtcaaataac

SEQ ID NO: 3751 - DNA, 196 bp, Lilium asiatic
  Clone ID: LIB3230-012-P1-K1-B4
cagagacgagtcctaactgagaggtttatgtttttgtagtttatatataataggggggtttagccatttgtttgaattgcagtttgttgtctgttttgtgtgtaaaaaaagaaggaatcagtgagatgttgaatctatatgtaacggatgtggtttgttttgttggagtatcttacaattggggagcatttaacgg

SEQ ID NO: 3752 - DNA, 384 bp, Lilium asiatic
  Clone ID: LIB3230-012-P1-K1-B5
gtcaagtgtggacaatgttgctccgtcgtgcaaccgccgcattacccaaaaccctgcaaaacctccggctatactctccggcagctacctccgcattacccctagaaacccaactagactacctccctggattcccgcgacccgacccgaagcacgcggagacgatcttggccgatccacggactgatttcggcacgaacatatcggcgaaagagcgcaaagcggggcgcgtacctaggatcatatccgaacaggtggaagggcagcacagttggtacaagcgagtggagttatagaagacgaatctcaaacggtagctgaggccttatacaccaagagacgtgagactgtgaccgatgtgggtgaagttgaaggtttacctga

SEQ ID NO: 3753 - DNA, 394 bp, Lilium asiatic
  Clone ID: LIB3230-012-P1-K1-B6
tagagagagaaaaactcaagtttctttaagagagagagatgtcgaaagaagtgagcgaagagggacacactcaaagccatggaaaagactacgttgatcctcccccagctccgttcctcgacatgggggagctcaagtcctggtctttctacagagccctcatcgccgagttcatcgccacgctcctcttcctctacgtcaccgtagccaccgtcatcggccacaagaagcaaaccggtccttgcgacggcgtcggtttactccgtatcgcttgggctttcggtggtatgatcttcgtcctcgtctactgcaccgccggtatctctggtggtcacatcaacccagctgtgactttcggtctgttcttggcgcgtaaggtctctctggtgagagc

SEQ ID NO: 3754 - DNA, 361 bp, Lilium asiatic
  Clone ID: LIB3230-012-P1-K1-B7
gcgttcggaggatttggatttttctgtaatacttgaaggagtcagctcatcatcagggtcaggggaggatagtgttgtctcatccagtgactctgacctttccagttattactttgacgggtccttacctgtttcagtttatgtggaagaacctgcaacccatcaagatgaatctcatctacctaaagatgaaaaccagatgcctgtactgcgccttaaccaacccgtgcaccaactaacttcgtcgaggaactgctgcggactacttgagcttctacgggctgatgatccatagaatacagagaataaggattagaaacataagcactagtgcactacaccctagagctcagagccacat

SEQ ID NO: 3755 - DNA, 393 bp, Lilium asiatic
  Clone ID: LIB3230-012-P1-K1-B8
cggacgcgtgggcggacgcgtgggttcaagaacagtggagttggaatctgtcctacgccgcgatgtctctccgccgctctatcctcggtctccaccgccaaacccacaacctctccctctcaaaggcgttacctttctcggtgagtaacatctcctccccatccgccgccgtgagaaacccaatcgggagagaaatctcttcgatcccattttccctaacccagaaactgaaaccggactccgggaatcgttctcttgggaaatctgatctcgccaaatttgctcgtctgccatcgtctcgaggttacagtaacgcatctctcgtacggaagatccctgttctgtttcacataaatgcaggaatggaagaagtttggcggattatgttcatca

SEQ ID NO: 3756 - DNA, 326 bp, Lilium asiatic
  unsure (1)..(326): unsure at all n locations
  Clone ID: LIB3230-012-P1-K1-B9
caaagatgttgaaatcaatcaaatttggataagattaagagacccgctaggacatgtataatttcttgattagatgtgtatacctcacaggagataatacattttatggtggtgaaaagtcgatcactttgagacggatctatttttcaaagaataattaatttaacataattttaactttgttctatgaaaatataggagcctccggatcaaaaaattataatcattaaaaattgaacactttgagatataacatacgaaatcattaaaagtgttcactttttgatgattagaattcttatatttacactncataaaagccagat

SEQ ID NO: 3757 - DNA, 181 bp, Lilium asiatic
  Clone ID: LIB3230-012-P1-K1-C1
tatgatatactttacaccattaaagttttaacaatatcagaacgacggcagactgtggaagagaaagttttattcatttacaactcattaactctaacgaccaacagcagacttgtgcctcatgaagtacttttcaggactatgcctacggaattttatcgagtgctgactttcgtactaa

SEQ ID NO: 3758 - DNA, 389 bp, Lilium asiatic
  Clone ID: LIB3230-012-P1-K1-C11
cccacgcgtccgtgatacctgggctccaggagggggggatgtaagaaaaattacaaacttgactcttagcccaagtgttatatttggttatttactaaaatctccctttgggggagaaggatggattgttagtgtggacgatttggaagatataattggagggcatgtatggttaggttccatttgtatatttggtggaatctggcatatcttaaccaaaccttttgcatgggctcgccgcgcacttgtatggtctggggaggcttacttgtcttatagtttagctgctttatctgtttgtggtttcattgcttgttgttttgtctggtttaataatactgcttaccctagtgagttttacggacctacagggccagaagcttctcaag

SEQ ID NO: 3759 - DNA, 390 bp, Lilium asiatic
  Clone ID: LIB3230-012-P1-K1-C12
ggaggttactaacggaaggaagctctacatccctccacgagaagtgcatgtccaagttaaacactccatgccgccgcaaaagctcgagatgttcaaatccttggaaggatgggctgacgagaccctcttgacctacttaaaacccgtcgagaagtcgtggcagccgacagattttctcccggaagccgagtcagaagggttctatgaccaagtcaaagagttaagggaacggtgtaaggagcttcccgacgagtatttcgtggtgcttgtcggtgatatgatcactgaagaagcgcttccgacttaccagaccatgttgaacacgttggatggtgttagggatgagacgggagctagtcctactccttgggcggtgtggactagggcgtg

SEQ ID NO: 3760 - DNA, 396 bp, Lilium asiatic
  Clone ID: LIB3230-012-P1-K1-C2
aactatggccctgaaatctgttcaaccctccgctaagtttcctcgaggatccagaagccactgaggaagattcggtggatgatgaagttgcagagattagagttgattatcgtaggagccgctgaagtgtaatgtgattgagtatgctccagagcagcccgagtttgaagatggttttaacgttgagttcaagcaaatctttgagaagtttaacttcagggaacctgtgtgattctttctgtctaagagacagttttagtatcatggttgaagcttataagttaaatgcagaagttttacggttggagctgatggtatcttaatggaggcttgacagaatttgaatattacaccgtaattaagccattcggagatctgagttttggtaaatggcac

SEQ ID NO: 3761 - DNA, 345 bp, Lilium asiatic
  Clone ID: LIB3230-012-P1-K1-C4
atggaagcgactcaagaacatatgacaatgaagggaggtttatgccggtgaatcttgagttgatatttagcaaatatgcgaaaacattgccagacaagttgagtcttggagaattatgggagatgacacaaggacaacgtgacgcatgggacatcttcggatggttcgcaagcaaaatagagtgggggttgttgtacttgctagcgagggatgaagaagggtttctgtcaaaagaagcgattaggaggtgttttgacgggagcttgttcgagtattgtgccaagatatacgcaggtatcaatgaagacaagacagcctactactaaaagtaaatggtagaggagc

SEQ ID NO: 3762 - DNA, 393 bp, Lilium asiatic
  Clone ID: LIB3230-012-P1-K1-C6
gacatatcttaacaaaatcttcatttaaaatagacaatcaatcttcattttcaacatttaatctattctattaaaattgaagtacaaaaaaatatttacccattttatagtgatttcttacattttcttcgttcctttttaactaatttaaaccactttatatattgtcttttttaaataattcgacttcatttattacagagtacaaaatagaacttacctattttaagtgttttattatatcttttatattcctttttactctttataattaattatatttactataataattcgataatatttattttacgtgttaaccaaaataatttcataagtttgaatgaaattgattcattcatgacaagaattcaaccgattagtaaatttttt

SEQ ID NO: 3763 - DNA, 390 bp, Lilium asiatic
  Clone ID: LIB3230-012-P1-K1-C8
attctctctctctctctctcgataactccgcgcgcagaaacctaaaatttctcagatccatctccaagaatggaagttaattttcgcacaaatggaacaagcgttaaggttaacgttccagttggtggtgatttgacatttcacattaaccctgttggcggactcgtaccacagattgacggcagattatacgtaaatggagcccgtgtttatcctcagggtagcggtggattcacaataaacgttaaccctgttgacctgctcgtacctcaggctggtggtggcgtcaaagatgaatatggatctgaaaaccctaaactatctgatccatctccaggaatggctaaccctaaggttttctttgatatgacggtgtgcggcaaaccggtt

SEQ ID NO: 3764 - DNA, 392 bp, Lilium asiatic
  Clone ID: LIB3230-012-P1-K1-C9
cgtaatcgaattcgggaggtgtagaggcaaccgatcgacatgggtaacacagatgagctgatgaatcagatattcgatctgaaattcacgtccaagtctcttcagcggcagtcaaggaagtgcgagaaggaggagaaggcggagaagctcaaggtgaagaaggcgatcgagaaggggaacatggatggtgctcggatctacgcggagaacgctattcgtaagcgtagcgagcagatgaactatcttcgtctcgcttctcgccttgacgctgttgttgctcgccttgacacccaggctaagatggccaccatcaccaagtccatgactaacatcgttaaatcccttgagtcttcccttgccacaggcaatctgcagaagatgtcagagacgat

SEQ ID NO: 3765 - DNA, 395 bp, Lilium asiatic
  Clone ID: LIB3230-012-P1-K1-D1
tccatattttcgctcaacggtattggtacacataacatttgtccccataatacatacttattccaataaatttttaaatttgtctctattctaataacatcagaagactaatatgatacatgaaaccgaaataatatcatagtcaaatatcaaagttcacctaatattaaagtacaaacctctacaaatgaattgttcagttacacatgttgatgggaaacacaatgataattcgtaaagtgatatcaccaattttctttattaatgtatttacgttcgacgatttcagacttgcaactacattcttttagaactctgcaacaggatttagattgattcatagttatagtttgaattacatcattctcatgcactatttgcttacatggcatatt

SEQ ID NO: 3766 - DNA, 394 bp, Lilium asiatic
  Clone ID: LIB3230-012-P1-K1-D10
gccgatggtggagaagacagcttcggttttgtattctccggttcaactggatcaagaatgctttgtttcagtggagactgccaaaacgacgacgaatcgctcttcctacaaccttctcttccctccggagtctcggtttctgacccttcatgcactaccaacatttgcaagaactcaaacgacgcgtgtgcggacaataaatctaccaaatcatcaaccaagaagagaatcgggtcggtcaatgggcaaactatggatcataaccgaaaacctagcaaaaaatgcaagcaaaatcaggagaaaccatcagttggaactgcaaaggtaaggaaagaaaggttaggggaaagaattgcagccttgcagcaattggtttctccatacggaaagacag

SEQ ID NO: 3767 - DNA, 394 bp, Lilium asiatic
  Clone ID: LIB3230-012-P1-K1-D11
aaaaagaatagctaaaagatggctctcgaagtctgcgtgaaagccgccgttggtgcccctgatgctctcggcgactgccctttcagccaacgggttctcctcaccctcgaggagaagaatcttccctacaaaatgcatctgatcaacatctccgacaaacctcaatggttcttagccattagtcctgaagggaaagtaccagtcctcaagaacgacgacaagtgggtgtctgattccgacgtcatcaccggcattctcgaggagaagtatcctgagccatctctcaagactcctcccgagctcgcctccgttggatccaaaatcttcggtaccttcgtgaccttcttgaagagcaaagactccagcgacggatccgagaaggccttgcttgatg

SEQ ID NO: 3768 - DNA, 392 bp, Lilium asiatic
  Clone ID: LIB3230-012-P1-K1-D12
aaaaaactcaaaaatatgaagtttgtatttatggatatgaaagttgtaaaagttttttagatgaaaatggagagaaaataaagatttgttggtttgaaatgaagaaaaagtagatataaattgaattcttgagctttaagaactcaaaatagttgttcatgatggttggaaattgatgatgatgtcattattgtaaatattgagaaatgtttagagtgtatttggttttttgatattttgaaataaataaaaaattatataataataacagttttgtaaatatttcaaaattttgaaaagggtatgaaaaattcatggctgaatagtatttacaaaaatggattagttttaggtttaacatgaaatgttaggttgttttttgaaaaatcact

SEQ ID NO: 3769 - DNA, 395 bp, Lilium asiatic
  Clone ID: LIB3230-012-P1-K1-D2
gaagaagtagtcatggcttactctatgctctcctccgccgctgttgttacctccccggctcaagccaccatggtcgctccattcaccggcttgaagtcttcctctgcattcccagtcacccgcaaggccaacaacgacattacctccatcgttagcaacggaggaagagttaactgcatgcaggtgtggccaccaattggaaagaagaagtttgagaccctctcttaccttcctgaccttaccgaagttgaattgggtaaggaagttgactaccttctccgcaacaagtggattccttgtgttgaattcgagttggagcacggatttgtgtaccgtgagcacggaagcacccccggatactacgatggccgctactggacaatgtggaagctttc

SEQ ID NO: 3770 - DNA, 348 bp, Lilium asiatic
  Clone ID: LIB3230-012-P1-K1-D3
attagaactagggttatatatttattaaaaaaatttaatatatataaatctttttctgtgattaaattatttgggatttttttttaataaaaaaaattaatttatatatttctgtatttattaaatatatttttttaatttacaggtctcatgatgatcagacccggccttgacagcgtcgtggtcgtggtggtacggggagccagtctcgggattccagccattttcacgattccccttcgccccacagctccaaccatacatctccctctgctgcacccgctcatgctcctctcgctcccgctgctgcatccgctcctgttcctccgggtcttccgggagtgatga

SEQ ID NO: 3771 - DNA, 350 bp, Lilium asiatic
  Clone ID: LIB3230-012-P1-K1-D4
aaacttctctctcttgttttctccgatctctttctaaaaagctacagatttaagatctttgttccggtggccggtggccttccgccaccggtcgcctaaccttttgttttttttgttttcgttgggttgtattatactctcgttttcgcgtaggtgactctcgttttcgcgtaggcgactctttgttcgcataggcgattttgttgtgtagcttcatccaaatcggagtgtttgtcattcctattttctccgataaggttgaagatgaataaagttcttgaaagttcttttctttcgcaggttcttcgtgtttaattccatcaattatttgattggatgctttgttcttt

SEQ ID NO: 3772 - DNA, 402 bp, Lilium asiatic
  Clone ID: LIB3230-012-P1-K1-D5
gcgagaaagagagaagaagaaagaaagagggaggaggaggctgctaagaaacgagatgaagagaggaggaaacgtgagaaagaagaagaagaggcaagaaagagagaagaagcaagggagagagaggaagaggaagccaagaaacgggaagaagaaaggaggaagcgtgaggaagaagaagctgagcgtaaaagaagagcagaagaggaagcaagaaagagagaagaagcaagggagagagaggaagaggaagccaagaaacgggaggaagaaaaggaagcggctaggaggagagaagaagaaagggaaaaggaagaagagatggctaaaagacgagaggaagagaggcagatgaaggagagagaagatgtggagagaaagaaacgtgaagaagaagaagaa

SEQ ID NO: 3773 - DNA, 395 bp, Lilium asiatic
  Clone ID: LIB3230-012-P1-K1-D6
ccaaaaacctatagaagggagtcaaatggcttatgggtaaaagaggaaaaaacatgttagggtgagaattttttgtgcttcacaaacacacagacaataactgttgtcgtgactgaacaagtgtataagcttccattttcacttgtcagaggacgaagtgctcccctggggcctaccaccgcccaccggagtcacgacacgtgttacctattctgagcttgtttgaggtatagaaatgacccccggaaataacgcttccacatcgcttatgattttttttgcgatgaccaaactggccccataatgttgctgacactaatcaaattagtggcaccatcttttaaaaaatggcactagagttaatctccaatcattcgatttgataaaaaaaatta

SEQ ID NO: 3774 - DNA, 391 bp, Lilium asiatic
  Clone ID: LIB3230-012-P1-K1-D7
gcgaccttcccttccactgtctccggcgagatctcactctgatccttcacggtggcgtcaacgtcagggcaacaacaagctctctcaagaaggaagcctcccccctcatcatctcctcctccttcctctgattcgcctctacgaactccctcggcgaggaaaccgatccccgaatttcccttttatcagcagaactggttcatcgctctcctcttcctgatggctctgggattcttctgcctcgctctcttcctctacctgagccttgatcccgattcaggctacacctccgcttccgccgcaccttccggtaaagaaggtgtcgagataacttatgggagcgcgattaagctgatgcacgagaagactaagtttcgtctgcattctcacg

SEQ ID NO: 3775 - DNA, 392 bp, Lilium asiatic
  Clone ID: LIB3230-012-P1-K1-D8
cccacgcgtccgatagaagagaattgaaaatagttttgtatcctgctttggcaaaattgcatgcttttcagatatggcaatctttcggacgacactgcttatgttgcttatccttgtctgccttaccacatatgagcttcatgttcacgctgctgaaggtgcagaaggcagtgaaggtgctgttaaaatcgattgcagtgggagatgcaaagggagatgcagcaaatcgtccaggccgaatctttgcttgagagcatgcaacagctgttgttcccgatgcaactgtgtaccacctggcacacatggaaaccatcatctatgcccttgctacgcctccattaccactcgcggtggccgcctcaagtgcccttgaatctatgcacagatgtatg

SEQ ID NO: 3776 - DNA, 392 bp, Lilium asiatic
  Clone ID: LIB3230-012-P1-K1-D9
gtgagaagagatatattttacatcccagaggggctataattggagataccagtgtttctggtacagaagttcctataaaaatgggaaatgccctacctttgagtgcggtttgaactatttgatttacgtaattggaagtaaccaattaggtttacgacaaaacctagaaatcgatcactgatccaatttgagtacctctgcaggatagacctcaacagaaaactgaagagtaacggcagcaagtgattgagttcagtagttcctcatataaaattattgactctagagatatagtaatatggagaagacaaaattgtttcaagcaccgacagaaccataagcgccccttgtttcaaagagaggaggacgggttattcacatttcatttgatg

SEQ ID NO: 3777 - DNA, 344 bp, Lilium asiatic
  Clone ID: LIB3230-012-P1-K1-E1
ataaccaggttgggttgaatactgaatatggctacgctaggagtctagcaagatatgctgcaaatcttggtcctgttgcttggagacttgccagcaagaggattgagacagtgttaccaagtggaatcgagtttggtcccggttgggttggagagaagccagaagctcctcagcagcaaaagtgttcgaatgacttggcatctgaaagcatacattcttccaaagaaagcaaagagagtgcatcagctgctcgcttgttgaatcaaaaaactgttaagtcagaaccgctgatcaatcctgagagcaacggtctactccgtggctgcagaggagtaaaccagatg

SEQ ID NO: 3778 - DNA, 392 bp, Lilium asiatic
  Clone ID: LIB3230-012-P1-K1-E10
cccacgcgtccgggcaatcaaccgtaatttaatcatcttcgcagggttattagcgtcttttacactcgccagtttcccggcaaacgttgccggcgagccacctctcttgttcaccttcggcgactcttcctacgatgtaggcaacaccaagttcttctcatcagcgttcgatccggccaccacctggccatacggcgagtccatcgactttccgaccggtcgttggtctgacggcaacattgtcccagatttcgttggtcgattggttggtaatcacgaaccggtacctccggttcttaatccaaaagctgatctctctcgtggagcaagctttgctatttctggagcaactgttcttggatctccatctgacactatgagttttggacaac

SEQ ID NO: 3779 - DNA, 393 bp, Lilium asiatic
  Clone ID: LIB3230-012-P1-K1-E11
gaatttactatcgaagattttttctgtattcgaaaaatttcgcaacaaaattgaacatattttttattatgagaataaatcctactacttcggatccagcggtttcaatacgtgaaaaaaacaacctgggacgtattgcccaaatcattggtccggtactggatgtagcctttcccccgggcaagatgcctaatatttacaatgctctggtggttaagggtcgagatacgcttggtcaagaaattaatgtgacttgtgaagtacagcaattattaggaaacaaccgagttagagctgtagctatgagcgcgaccgagggtttaaagagagggatggacgtggttgatatgggaaatcctctaagtgttccagtcggcggagcgactctaggac

SEQ ID NO: 3780 - DNA, 396 bp, Lilium asiatic
  Clone ID: LIB3230-012-P1-K1-E12
aaaaagtggaggcggatctcgttctcaacgttacagtaaccatggaggaagaagaagcaatcacggttccaaatctcacaccatgcatggagctgccacgaggttcgtttcctcctccgattcgttctctctcgagccaatctggttcagctctgcacatgaaaactcgccgcgacaatggccgattggttctggaggctgtctcgatgccgtcgcacaacaacttctccgccaagcgccaagacgggcggctcctcctaacttttgcgggaatcagcgacgaacccgattgtgaaattgacatcgttagcgacgaagaagacgaaactgatgagcttcagtggtccgacgaagaagaagaagaagaagaggaggaagtggtacaagacgagtttg

SEQ ID NO: 3781 - DNA, 390 bp, Lilium asiatic
  Clone ID: LIB3230-012-P1-K1-E2
ctgagaaaacagtgagagagtgatgagttctgttcgctacaaaccatcagatccatcgcggtgcacacctgtcattgcttccgaatccatcgagagtaggaagaagctggagaagaagaaaaagagccacgtgttgctagaaggctacgtggagagtctcgccacgttggataataataaccaagacgatctgacgagatccaagagcttgaccgacgacgatctcgaagatctcaagggttgtctagatctaggctttggtttcagctacgacgagatccctgagctctgcagcactctccccgctctagagctatgctattccatgagccagagattctctgacgacaacaacaagtcatcgccggaaaattcgtcggtggacgattc

SEQ ID NO: 3782 - DNA, 395 bp, Lilium asiatic
  Clone ID: LIB3230-012-P1-K1-E3
cggacgcgtgggagaagagaagagttaaggtaaagagcgaaaaatggcagcacaggcacttgtctcttcttcacttacctcctctgttcagacagctagacagatattcggcacaaaaccagctgtctccgtgaggaagacctcctttgttattaaggctgcctcaactccacctgtcaagcaaggagcaaacagaccattgtggtttgcatcttcacaatctctgtcttacttggatggcagcttacctggcgactatggattcgacccgcttggtctttcagacccagaaggtactggaggtttcatcgagccaagatggttagcctacggagagatcatcaacggaaggttcgctatgttaggtgcagctggagctattgcccctgagattc

SEQ ID NO: 3783 - DNA, 376 bp, Lilium asiatic
  Clone ID: LIB3230-012-P1-K1-E4
cggacgcgtggggaaaataaagaaataataagttaataaaaatggagtagaaggagccagggttccaaatgaacaaattcaaacttgaaaaagtctctttctgattctcgaagaatgaggggcaaagggatggttcgggaaggatttttggttttaatattaggacgggtggttggacccgcagatgtttggtaaaaagaataatcttatcctttgagaataatcaaaaatagaaagtgttcaattggaacatgaaaacgtgaccgagtttatcctagttactcttcgggacggaggagattcgcgaacgaggaaagggacccaatgacttcgaaagaattgaacgaggagccgtatgaggtgaaaaatctcatgt

SEQ ID NO: 3784 - DNA, 397 bp, Lilium asiatic
  Clone ID: LIB3230-012-P1-K1-E5
cggacgcgtgggctgtgtttctcatcttccgttatgtgcctcaatatggacagacaaacgtaatggtctacatcggtatttgttcgcttgtaggatcattatcggtaatgagcgttaaagcacttggaatagcactgaagctgacattttctggaacaaatcaattattttatcctcaaacttgggtatttacattggttgtacttacctgtgttgtaacccaattgaactacttaaacaaggcacttgatacattcaatacagctatagtatctcctatatactacgtaatgttcacatcactaactatattggccagtgttatcatgtttaaggactgggataggcaaaatggcactcaaattgtcacagagatgtgtggatttgttacaatact

SEQ ID NO: 3785 - DNA, 397 bp, Lilium asiatic
  Clone ID: LIB3230-012-P1-K1-E6
agcaatcttctcagttttcatcgctagttaatttactttacgatcaagatgcagggcttggttaagactctcaccggaaagaccatcaccctcgaggtggagagctcggacaccatcgacaacgtcaaagccaagatccaggataaggaaggcatcccccccgatcagcagaggttgatcttcgccggaaagcagttggaggatggacgtactctcgctgactacaacatccagaaggagtctactctccacttggtgttgcgtctacgtggaggcatgcagatctttgtcaagacactgacgggaaagacgatcactctagaggtcgagagttccgacactattgacaatgtgaaaaccaagatccaagacatggaagggatccctccggaccagc

SEQ ID NO: 3786 - DNA, 210 bp, Lilium asiatic
  Clone ID: LIB3230-012-P1-K1-E7
cttccgggccccttggttttgaattgagaagaaacccaaaccctaaccatgggcgggggctgttcttaattgacaatgcccgcccacaccgacatggtcaccggcattgccacgccgatcgacaactctgacattatatggacctcatatcgcgacaaatacataatactctgggaactcaccaagggcgccacgtgctacagcgtttcc

SEQ ID NO: 3787 - DNA, 390 bp, Lilium asiatic
  Clone ID: LIB3230-012-P1-K1-E8
cccacgcgtccggataaagtttctctctagggtctctccacaaaatcttcaacctagccgccgcgttttctgttcaatcacctcggtggccggacgcttctgctccggtcgccacccctgtccgtgttctgatgcccaagccttctccttgttgctctcctcatcatgtctctcctccttgcttggtggctctggatttctttttagatctatcgggaaccatgggcgtccatggtttctccggagttccggcgaggcgaggtagatcgaggatacctcaggggctttgaatcaacctgggatgtgttgattgtgctcagatttgggtcatatctgaggctgagaaccaccagtctcgtgtgacgcgctgccgtcgctgctcctggctca

SEQ ID NO: 3788 - DNA, 390 bp, Lilium asiatic
  Clone ID: LIB3230-012-P1-K1-E9
atccaaacatcgtttaattcgaaatcaaggtctaagagaagcttagagggatcttagtcatgtcaagaaggcaagtaggttccacgaggcgtggaggggatagtggaagctttccatttgtaggagctttgcactctaaatcacgttcctctcctctgctttctatttgccttgttctcgtgggagcatgccttctcattggttatgctttcagcggtccaggtttgtttaaaagtatcagagaagtcagcaagatcacaggtgactattcatgcacatcagaagttcaaagagccattcctattctcaagaacgcttacggagatagcatgcggaaagtcttgcacgtgggtcctgaaacatgctcagtggtctctactctgttgaagg

SEQ ID NO: 3789 - DNA, 348 bp, Lilium asiatic
  Clone ID: LIB3230-012-P1-K1-F1
aaaagagacgagcagcttaaagccgaagaaagaagcagagtaaaccaaaaaaaaacatgggagaagagaaggcgaaactggcgcttgtgttagccgcaaagtcaagatcattgctgtacacattgacacctgctactacatgtgtactttgcctcttcgattcacactcttgcctatgtttcgttttgcgtgggaagatcaaccaggcatgctaaagaacccttttcttgctttgtcttacccaaaatgtcttgaattgtcaccgagcttgctgcttaccggagagtatactcaaatgcccttgcctgagaggaaacatgggctctttgggtttatgaagaggaaagg

SEQ ID NO: 3790 - DNA, 394 bp, Lilium asiatic
  Clone ID: LIB3230-012-P1-K1-F10
cccacgcgtccgcagtcaagaagatggctgagcattcgtcctttgtgaactcctgctgtcctacgcgcagagggttgcctttgatcatcagcgggtcggatgatggaactgcaaagctttgggatctgcgtcagagaggagctattcaaacgtttccggataagtaccaaatcacagcggtgagcttctctgatgcagctgataagatcttcactggaggtgtagacaatgatgttaaagtctgggacctgcggaaaggggaagccaccatgacgctccaaggacatcaagataccatcacggggatgagtttgagtcctgacggttcctaccttctcaccaatgggatggataacaagctctgcgtgtgggacatgcgtccttacgctccaca

SEQ ID NO: 3791 - DNA, 239 bp, Lilium asiatic
  Clone ID: LIB3230-012-P1-K1-F11
caaaagatgagtatctcaaacctggttaactgaacccaatcctcctctcatgttttgtggagctatctcagctatatatacaggcacctaagaccatttgaagaaaaaaagttgcatataatataccaaacgtgttacttccataagcaaaaaaagaacaaaaaaaaactagatgagttgagtggttaccgtgtaagagatgataccaacaccaaagccttctaaaagccgtcccatgt

SEQ ID NO: 3792 - DNA, 372 bp, Lilium asiatic
  Clone ID: LIB3230-012-P1-K1-F12
caatagcataatggcggatactgctagaacccatcacgatatcaccagccgtgaccagtaccccttgttgggccgagaccgagaccagtatccttacggacgatcagattaccagacctccagccaagactactccaagactaggcagattgctaaagctgctaccgcagtcaccgctggagggtcccttcttgtcctctccagtctcacccttgtcggaacagtcattgctttgactgttgccactcctctgcttgttatctttagcccaatcctcgtcccggctctcatcaccgtagcacttctcatcactggctttctctcctctggtgggtttggcattgcagctataaccgtcttctcctggatcta

SEQ ID NO: 3793 - DNA, 395 bp, Lilium asiatic
  Clone ID: LIB3230-012-P1-K1-F2
ctctcatatgtgaaagccaaagctctctacctctctatggctctgcttgtgtagccaggggtaactcgataatggcttcctccaaacccctcatctacctatcctactaaacttaaccaacccgcgtcaacctccccaaatccatcaaactcccccagatccccaaacccatcttctactccctcagcagcaaggctctgtctttatcctacggcaccgtaaagtctctagctttaatcgccgccctggctcccccttcgatggccgaagctatggagaaggcgcagctctgagacttcaacctgacgctgccgatcatggtcgtggagtttatcttcctcatgttcgcgctcgacaaagtctactactcgccgcttgggaactatatggataag

SEQ ID NO: 3794 - DNA, 214 bp, Lilium asiatic
  unsure (1)..(214): unsure at all n locations
  Clone ID: LIB3230-012-P1-K1-F3
atataagaaagcaaatccaaagctaagaaacgatgtcattatcggcttaaacagaggtggggacactgacactgacttaaaccaaacccnctacaagaaatcccgatcactctaagaccaactttatcagcgtatctaaaatgatgaaacaaagtcaattgcctatacaaataaaggaaaactaaagaaaaaaagctttatcgatcttcaaaaa

SEQ ID NO: 3795 - DNA, 394 bp, Lilium asiatic
  Clone ID: LIB3230-012-P1-K1-F4
tgattaaccactacaagatgagagggaacataattagctacaatctcggagggatgggttgctcggctggtattatagccctcgatcttgctcgtgacatgcttcagtctaatccgaatagttacgcagtggttgtgagcactgagatggtcgggtataactggtacgtgggacgtgacaagtcaagggttatacctaactgtttctttaggatgggttgctccgccgttatgctctctaaccgccgccgtgacttccgtcacgctaagtaccgccttgagcacattgtccggactcataaggctgccgacgaccgtagcttcaggagtgtgtaccaggaagaagatgaacaaggatataaggggttgaaaataagtagagacctaatggaagt

SEQ ID NO: 3796 - DNA, 246 bp, Lilium asiatic
  Clone ID: LIB3230-012-P1-K1-F5
acggtcaacaagagcaaaaggacggatacagctagaacccatcacgatatcaccaccagggatgagtatccattgattagcctagacccagaccagtatgacatgattgagcggaaccagtacaatatgtctcccacacatctactttacgtatgcaaaaaatgattaagctaccactgcagtcaccgcaggtggacctctcagagatgtttccaacatcacagtcttgtaaacgccgatcgatgt

SEQ ID NO: 3797 - DNA, 402 bp, Lilium asiatic
  Clone ID: LIB3230-012-P1-K1-F6
atcaacagattaaacatgaagcttcttcatggactcgctttagtttttctattagctgctgcgagttgcaaagctgatgaagaaattacttgcgaagagaacaatccattcacttgtagtaacactgatattctaagcagtaagaacttcggaaaagatttcatcttcggtgttgcatcttctgcttaccagatcgaaggagggagaggtcgtggtgttaacgtttgggatggcttcagtcaccgatacccagagaaagctgggtcagatttgaagaatggagacactacttgtgagtcatatacgagatggcagaaagatgtagacgtgatgggcgaactcaatgctactggctacagattctcctttgcgtggtcaagaatcattccaaaaggaaaggtc

SEQ ID NO: 3798 - DNA, 217 bp, Lilium asiatic
  Clone ID: LIB3230-012-P1-K1-F7
tctttattgacaaacaattttcagtagatgaactgtattagtaaggggaaacaaatcctcacttatttaataccaaacaacacaacaacaaatgggttacaaatcccattatcccctcccccacttttgtgtaaaaaatctcatcaccacacaggcatataaatcaaattatttaattccaccctgaacgtggagagaagggaaaaaacataatcgc

SEQ ID NO: 3799 - DNA, 390 bp, Lilium asiatic
  Clone ID: LIB3230-012-P1-K1-F8
atcgacaagaagaagaagcggaacaagaagagcatcgagacgtacaagatctacatcttcaaggtgctgaagcaggtccaccctgacatcgggatctcgagcaaggccatggggatcatgaacagcttcatcaacgacatcttcgagaagctcgcccaggaggcctcgaagctcgctaggtacaacaagaagcccacgattacttcgagggagatccagactgctgttaggcttgttctccccggtgagctcgcgaagcacgctgtgtctgaaggaaccaaggccgtgactaagtttactagctcttgaatggtgttttcgtgttttaggggttctagatctggtcgcttttggttttatctacttaaaaaaatcgtatgggttatgctt

SEQ ID NO: 3800 - DNA, 389 bp, Lilium asiatic
  Clone ID: LIB3230-012-P1-K1-F9
cctcaattcatacttgagcgtatcgtctcacaagacgatcgatggaagaggacaacggatcaagatcactgggaaagggataaggctgaaggaatgtgaacatgtcatcatttgcaatttggagtttgaaggtggtagaggccatgatgttgatgggattcagattaagccaaagtctagacacatttggattgataggtgtagcttgagagactacgatgatgggcttattgatatcactaggcagagcactgatatcactgtttctagatgttattttgggcagcatgataagacgatgttgattggagcggatccttctcatgttgatgataggtgtatcagagtgacgattcaccattgtttctttgatggaactaggcagaggc

SEQ ID NO: 3801 - DNA, 394 bp, Lilium asiatic
  Clone ID: LIB3230-012-P1-K1-G1
gttttacaaagtttattgcaatgtcgattatatctaagaaaaacaattcctttgttcttgtgaaaaacattgattccgctgatgaaacacaaaaaatcaaagtgaaggttctggtcctctggaagacctacaagagttctggaaacactcatgagatggtgttgattgatgaagagggaacaaggattcatgctcaagttgaagaagacttgatgaagaaacacctaactgttctgaaagaaggtgaagctgtgagcatcaatactttccagttgaaggactatcttggggaatttaggaccaatccttatccttataagattacattcttcagaacaactaaggtgaaagcagctgatgattttctcgagtattatcccgaaaaatacttttc

SEQ ID NO: 3802 - DNA, 400 bp, Lilium asiatic
  Clone ID: LIB3230-012-P1-K1-G10
gaacacaacaaacgattctttttaagagaatctctctctctattctctccacttctctctctggatcgatggcagcttcggttgatcctttggtggttggaagagtgatcggagatgtgttggacatgttcatccccaccgccaacatgtctgtctactttggccccaaacacataactaacggctgtgagatcaaaccctccgccgcagtcaaccctccaaaagtcagcatctccggcaactccaatgagctttacactctcgtgatgactgacccggacgcacctagcccgagcgagccgaatatgagagaatgggtccactggattgtcgtagatatcccgggaggcaccaacccctcgaaaggaaaggagatactgccatatatggagccgagacc

SEQ ID NO: 3803 - DNA, 402 bp, Lilium asiatic
  Clone ID: LIB3230-012-P1-K1-G11
cggacgcgtgggcggacgcgtgggcggacgcgtgggcaatggaggaaaatgagtgtttagagagtgaaggcaagataagttggatttggagtaaggcagtaagtgttggcaagaaggttctaacagctggtgttgtagtgtcttcagctccactcctgtttcctccacttgttgtcgcctctaccatcgccttcatatcctcagttcctttttgtctcttcttggcaaactacgcttgtactcaaaaggtcatgaggactcttcttcctcctaatgaagaaacaagtagtggaatagagaaagatgaatattcgtttgaggccgccaagcttggtcatggtgcagcaggcatggccgaatttgatggggcggaaccggttctcatacagagtgaggaagatg

SEQ ID NO: 3804 - DNA, 403 bp, Lilium asiatic
  Clone ID: LIB3230-012-P1-K1-G12
aaaaaaaccagttttgatagctaaaccgtggacttgcgtgcctaaacgaagcgacgaagaagcgaggcaagctttgatgacgaaagggaacgtgaatttatcgagatttgagtgagagagcatgaggacgaagagaaggagagcttcgcgaggcttgttgttaacggagagagatcttatcatgaggttccaggtgaaagtggaaggagagtggagctgacggaagacgagagaagcgtatcgggtttccccgaaggaggaagagagggtgatgaggtggcgcgcgaggagctggtcgttggcgaggttgtggcggatgattttggcgtggatttgtttgagttgggggaagtttgagcatgttctgaggaagaagtaggctttttcggggcggaagagggga

SEQ ID NO: 3805 - DNA, 394 bp, Lilium asiatic
  Clone ID: LIB3230-012-P1-K1-G2
gccacgtatcggtaagaacacgttggtggttcaaggtgtcacttactgtgacactggcaggttcggcttcgagactgctgaatcctcctacaccgtccccggtgcgacggtgaagcttgtgtgcagagacaggaagacgatgaaagagttatacacaaacgtagctacttcaaacaggcatgggaagtacatgttcgttgtccacgaggaccacaaggacgagatgtgcgatgttatgcttgtcaaaagctcagacaagggttgctctaaaatctccaaggggcgtgaacagtcgcgtgtgatcttgaaccattacaacggcattgcgtcgcagattaggcatgctaacaacatggggttcgagaaagatgtttctgatgtgtaatgctctgag

SEQ ID NO: 3806 - DNA, 390 bp, Lilium asiatic
  Clone ID: LIB3230-012-P1-K1-G3
ctcttcaacaagatcataatggcggatactgctagaacccatcacgacataaccagccgtgaccagtacccgatattgggccgagaccgagaccagtatccttacggacgatcagactaccagacgtcgggccaagactactccaagactaggcagattgctaaagctgctaccgcagtcaccgccggagggtcccttcttgtcctctccagtctcacccttgtcggaacagtcattgctttgactgttgccactcctctgattgttatctttagcccaatactcgtgccggctctcatcaccgtagcacttctcatcactggctttctctcctctggtgggtttggcattgcagctataaccgtcttctcctggatctataagtacgca

SEQ ID NO: 3807 - DNA, 190 bp, Lilium asiatic
  Clone ID: LIB3230-012-P1-K1-G4
aacaaacccctagatatggcggagaagcttgcgccggagaagcgacatgatttcggtcataaggggcaaaaggtgtttgagtgggatcaaacccttgaagaagtgaacttgtacataactctgccgccaaatgttcattcaaaggcatttcactgcaaaattcagtcgaaacatctcgaagttgggcata

SEQ ID NO: 3808 - DNA, 328 bp, Lilium asiatic
  unsure (1)..(328): unsure at all n locations
  Clone ID: LIB3230-012-P1-K1-G5
agatcataacataagttattcggcagattttgattcctatatatccactcgtgtggtacttctaccatatatagaagaattctacgatatatataagataagatccatccgtatagatatcatcatctacattcagaaagccgtatgctttggaagaagcttgtacagtttgggaaggggttttgattgatcaaaaagaagaatctacttcaaccgatatgcccttaggcacggccatacataatatagaaatcacacttggaaagggtggacaattagctagagcagcgggtgctgtagcgaaactgattgcanaagaggggaaatc

SEQ ID NO: 3809 - DNA, 404 bp, Lilium asiatic
  Clone ID: LIB3230-012-P1-K1-G6
aagtctcaacacataattacagagacacaaatttatacagatcttatgaaaatcgattgaaaccctcgttgaagtttacttagcatccatttcattgttaggaggatacttaagtaatgtcgatggatcacaagcataaggttgtgtgttaaagtagtacagtaatagcaaaaccacagagaacaccaaaacactgtcaggttaatataggaatatatatacataaatatcttaggatatcactaaaaaagcattgtcacaaatatatactctaattaaagattaaaatgaccaaaatattcattaaaaatgtaaatatacatttatatccctacggttaactaatctaaaccttagtttagaataaaagagtggaaatttgagattaaattttaaaattttac

SEQ ID NO: 3810 - DNA, 390 bp, Lilium asiatic
  Clone ID: LIB3230-012-P1-K1-G7
cggacgcgtgggtgtctacagagaaaacctaagttgcaaccatgggtatttctcgtgactccatccacaagaggcgtgccactggaggcaagcagaagcaatggaggaagaagcgaaagtacgagatgggaagacagccagctaacaccaagctgtccagcaacaagacggtcagaagaatccgtgtccgtggaggcaacgtcaagtggcgtgcattgagactcgataccggtaactactcgtggggaagtgaagctgttacccgcaagaccagagtccttgacgtggtctacaatgcctccaacaacgagcttgtccgtaccaagacacttgttaagagcgccattgttcaggtcgacgctgctcctttcaagcagtggtacttgcagc

SEQ ID NO: 3811 - DNA, 346 bp, Lilium asiatic
  Clone ID: LIB3230-012-P1-K1-G8
cggacgcgtgggttaccaaaaaaaaaacaatccatttggttcagttggatgccaaattttaactaatatttatcaaaaagttccatttgattcagttggataccaaacattttgattattatttccttattcaaagatatatctttaaaaaaaaataagtataaattttaattattgtcaaaaactttaattatgttgatcaaactaatatttatctagcatttctgaaaattgatatcacaagatgatgtatttattataaaatatttactttcagatattatgaaaaaaagaaaatattatgaaaacataaaaattattaacttaaagggaaattgcacccagt

SEQ ID NO: 3812 - DNA, 284 bp, Lilium asiatic
  Clone ID: LIB3230-012-P1-K1-G9
cccacgcgtccgccatctcaaatcttagtatcctcctgcgttggacgttgtaatggattctcaggacacagtcaggcatcgtggaggagacgaaagagacgcggcaaccaccgctacggccgagacggacaggaaacacgcagatgacaacaacaaaggccaacgcgaccaaaagagggcgatggccaaacgcggtcttaaatcgcttacggtagcggttgcggctcctgtgctcgtgatgctcttcgaaacgtatttcctcggcggctacgggagtcgtgctc

SEQ ID NO: 3813 - DNA, 91 bp, Lilium asiatic
  unsure (1)..(91): unsure at all n locations
  Clone ID: LIB3230-012-P1-K1-H1
cggccggtttccgggtcgcccacgcgttcgccacgcgtncctaaatttaaatttaaatttttataaaacttttaaattttttttaaaggag

SEQ ID NO: 3814 - DNA, 253 bp, Lilium asiatic
  Clone ID: LIB3230-012-P1-K1-H10
gtgacttcaaagcaatatatggtaattctgaaaatacaatctatacaccataagtggacactgcactacacctagaaactactcctactgtcacatgaatgtcctcaaaagcaatacattagttgaagtatatcttctacatatacttcttaaggatattcagtttatatcacccctaactacattggggttttagaaacttgatttaaaactgatatgaaagtgcaatcaatttctttctgcatcaatacat

SEQ ID NO: 3815 - DNA, 397 bp, Lilium asiatic
  Clone ID: LIB3230-012-P1-K1-H11
taacaaacaaagttaaaaacatacacaaatggcgaacaagctcttcctcgtctcggcaactctcgcctttttcttccttctcaccaatgcctccgtctacaggacggttgtggaagtcgatgaagatgccacaaacccagccggcccatttaggattccaaaatgtaggaaggagtttcagcaagcacaacacctaagagcttgccaacaatggctccacaagcaggcaatgcagtccggtagtggtcctagctggacccttgacggtgagttcgattttgatgacgacatggagaacccccagggcccacagcagaggcctccgctgctccagcagtgctgcaacgagcttcaccaggaagagccactctgcgtttgcccaaccttgaaaggagca

SEQ ID NO: 3816 - DNA, 381 bp, Lilium asiatic
  Clone ID: LIB3230-012-P1-K1-H12
cgggtgggcccacgcgtccgcttacacatccatgtctcagatcatatgctctaaaaccttcccacgttctttcacatgcatgctcttccatttttttgtttctatttctttatatattattattctatatatagtaatgtgttttatttcctcgattttctgttgtctttacagaaaagtgttgggtttgcctataattggtataggatccaagactagaaccaatcttcttcgctttttttccttctcatgtgtatcgattaataagttttttccgaaatgataatattattataaatttaaaaacccgataaacgagaatacaatctcgatttcaaccaaaatttatctagattcaaatatcataaacgagcttcgcat

SEQ ID NO: 3817 - DNA, 390 bp, Lilium asiatic
  Clone ID: LIB3230-012-P1-K1-H2
cggacgcgtgggttctgagttgatacaacttagaactcaaaacggaatactaattgatagggtttattataagtataaatggagtatcgtgctaataagaagaatatagaaatagagtctaccactaattctcagagacctaatagatgaaaagcactacgaagacgcgttcacatgaaaattgcattgaagttttctttttcttttcaaaatcactttctataaactaagttaagtttgtccagctaatctattactattcggttatcaatgccaaacaacagtgatggtctagaggaggaacatgaaaggtggacagaaatggagagtgagtggatatctttaacagatgatctacgaatggatattgataaccaccgtagacacgca

SEQ ID NO: 3818 - DNA, 391 bp, Lilium asiatic
  Clone ID: LIB3230-012-P1-K1-H3
ccattcctcgcgaatctgagatttcggaagtttcgatcgatttgggggtttagggtgttgggctctgctaagactaagagtctgatcaatgacgccgcctccaggtctttactccggtaccagcactcttgctctggtggcccgtgcttcagctttcgggctgggtctcatctacgggaacgtcaagctcaaggctttgaagattaagaagaactcacagattaaagcagaagccaaggctcatcactaagcaccaaacatctttctctccattcaaaataagaagatgaagcccaagtgactctcctctccaaatgtgtgctgtttcttcataagctatatctccttcagttacatttttcggcttttttttttatcgaggaacataaca

SEQ ID NO: 3819 - DNA, 407 bp, Lilium asiatic
  Clone ID: LIB3230-012-P1-K1-H4
cgacttcttcttctccgtctcaattgcagtgactccgaccgacggtttgtgggctcctttagccacaccgtcggtcgggatttgtctattgttctctcttttgatatctattgtatatttggaagtttaaagcttcatactttctataaatccttgtagatccagatcttcagacctcttttcagttgtttattatgtggtgtttgtagatctgtccatgcatggtctctcccagtgaaaaacctctgtttctttgggtctcagtgttaataggctctgagctgattttaagatttttctttgaatctgtctcatcttctcctcactgcatgtggttttaattgattgcttcaagtggtgaaggtgtgggttatggaggagtgcttctctttggatgtgattgcaac

SEQ ID NO: 3820 - DNA, 100 bp, Lilium asiatic
  unsure (1)..(100): unsure at all n locations
  Clone ID: LIB3230-012-P1-K1-H5
agatgaataagcgaccctttgaaaaggacgagtcaannnagagtgcnnttgaaattgtctgggaggcggaagacggatggggagccggtccaacgccccc

SEQ ID NO: 3821 - DNA, 409 bp, Lilium asiatic
  Clone ID: LIB3230-012-P1-K1-H6
acgccacgcgttcgcccacgcgtccggttttttttttcacaagacccgaaaatttatgtatttctgcctcacttcctaaatggcatccgtcgaatgcagcatcggtgattcaatctcaacacttcatcctgacatcatccaaacccaaatcttgacccgtctggacggtccgacgctagcctccaccgcgtcaacctcctcttatctccaaactctctgctatgagcaaaaactctggcgggaaatctccactgccacgtggccttgcatcaacgattcacgtgtggttcaagctatctcctccttcccttctggttaccgttccttcttcgctgactcgtacccgttcactgaatacacgtgggagtcggagaaacaagatccaccgaccacgggactaatctcagcc

SEQ ID NO: 3822 - DNA, 107 bp, Lilium asiatic
  Clone ID: LIB3230-012-P1-K1-H7
cggacgcgtgggtgcaattggtggataccatatgcagatactaatgctactttgggctgaaaatagtaattcacaactaaaataaataaacacacttattttcaagc

SEQ ID NO: 3823 - DNA, 382 bp, Lilium asiatic
  Clone ID: LIB3230-012-P1-K1-H8
gttttacttccttaccttaactgctgttctcgccgcgactgcaaacgctggcggaccagttctcgattccaaaggtcatttcatcttcagcggtagttactacgttatccctcgcatcttcggcgctgcaggtggcggcctgactctagtcccccgtggtgacaaacaatgtcctctctatgtcggtcatgaaactttagaggttaagatgggcattcccgtaaaattctcaaactggatgtcaagagttgggttcgttcccgaatcagagaacctcaacatcatgatggatgctaaagctacgacctgtgcccagtcaaactactggtgggtcgctccttccgacaaggaccgtaagacgtggttcatagcggctggtcct

SEQ ID NO: 3824 - DNA, 385 bp, Lilium asiatic
  unsure (1)..(385): unsure at all n locations
  Clone ID: LIB3230-012-P1-K1-H9
gngtgtttgtgattataatggcaacatcggctcgtagagcatacggtttcggtagagccgacgaggctacacaccctgactccattagagccaccttagctgagttcctctccacttttgtcttcgtctttgccgctgaaggctctatcctctctctcgataagttgtattgggaccgtgcggctcatgcgggaacagacactccaggaggactagtattagtcgcgttagctcatgcgtttgctctgttcgctgctgtttctgcagccgccaatgtctccggtggacacgtaaacccagcagtcacttttggtgctcttatcggaggcagactctctgccatccgtgccatctactactggatagctcagcttcttggagccat

SEQ ID NO: 3825 - DNA, 210 bp, Lilium asiatic
  Clone ID: LIB3230-013-P1-K1-A11
cggacgcgtgggcaaataccccgtcccctttgcactgatggcgccgaaatgcgagaagaagcccgctgagaagaagccggtggcggagaagcccgctgccgaggaggagaagaagtcagccccggcagcggcggagaagaagccggtcgagaagaagcccatgtctgtggagaagctccatgcctacaaggtaggttcctgcgacatgca

SEQ ID NO: 3826 - DNA, 374 bp, Lilium asiatic
  Clone ID: LIB3230-013-P1-K1-A12
atggcacgctgctttaccgactgttgatgcctgaagaaccgtactctaacttggccaaggatcttttgtgcctctgcaccataacgactgtcaatctgaagtgtggagatctggcgcatcgactacattccccaagtctcacctggacatgttcagaactggaaacaatctacacttgtcgaggtaaggctgcatgtcttgacgctccccaatactttattttttctcaaatacgaaccgaagcagtgtagcttagttctacactaaaaggcatgtctaagcctttatgatatgaggcctaaatgtcaaatatacaatgaagttgcaaattttcaaaggttttcccaggcaactttgaatctaggagaattctg

SEQ ID NO: 3827 - DNA, 380 bp, Lilium asiatic
  Clone ID: LIB3230-013-P1-K1-A4
ctcactctcgatccgtccaatccttccttttctagagatggataccggaagcaagtcgaagaagggcgctggtggccggaagggcggcggtccgaggaagaagtcagtctctcgctcagtcaaagccgggctccagttccccgtcggtcgtatcggacgatacctcaagaaaggacgctacgccaagcgcaccggcgccggtgccgccgtctacctcgccgccgtcctcgagtacctcgccgcggaggtgctggagctggcgggcaacgctgcgaaggacaacaagaagagccggatcattcctaggcacctgctgctggcggtgaggaatgatttgggagctggggaagctcctggccggcgtcaccatcgctcatggt

SEQ ID NO: 3828 - DNA, 250 bp, Lilium asiatic
  Clone ID: LIB3230-013-P1-K1-A5
gatgccgaatcatttttggagtcgtataaaagctctcaacatgcgacgatgctgtgtagatcagccgtcgcttgagcccaaagatggcgataaattcattgctggaggagaagatatgtgggttcgtgtctttgattcatacactggtgaagaaacagcatgtgacatatgccacctaggcacttgtcactgtgtccgatgatttattggaagctagtgaaactcatcgccgtcggcaccatgaaccatg

SEQ ID NO: 3829 - DNA, 378 bp, Lilium asiatic
  Clone ID: LIB3230-013-P1-K1-A6
tgaggacgaaaaactgaaggcaagtaatgcatcagaagctgttagtaactgtgagggtttcatacttgctcaggccaatgcatcaggtgtagttattgaggacgaagaactgaaggtaagtaatgcatcagaagctgttaatgcatcaggtgtagttattgaggacgaagaactgaaggcaaataatgcatcagaagctgttagtaactgtgagggtttcatacttgctcaggccaatgcatcaggtgtagttattgaggatgaagaactgaaggcaagtaatgcatcagaagctgttaatgcatcaggtgtagttattgaggacaaagaactgaaggcaaataatgcatcagaagctgttagtaactgtgcggcttt

SEQ ID NO: 3830 - DNA, 406 bp, Lilium asiatic
  unsure (1)..(406): unsure at all n locations
  Clone ID: LIB3230-013-P1-K1-A7
taccggaactcggcagtgttccgggtcagacccacgcgtaccgatctagcatgtcaggattatcgatgcatttcgatgaacagaagcgcttctctttagcggctatacattagatcacagtgtctcatgattctanaatcatgccactcagtgtgaattgctgtatacctttgtcatgcaagtatcgccgataacattagtgaaggtgtactcaacatcagtggcaatgcttttgacagcgtttgtttcatattttctctttaacttccatctctccttagcattttttcttggctcaacggttgtatctgtctcaatttaccttcactccattgggaagccacatagatgatcctgtccactgaaatactttattttagtcaactagtttaccgactttgttgga

SEQ ID NO: 3831 - DNA, 421 bp, Lilium asiatic
  unsure (1)..(421): unsure at all n locations
  Clone ID: LIB3230-013-P1-K1-A8
ccgggggacctacgcgtccggaaccatctagtcgtcatttcccgcggtatccggttatgtagcacctcctcnncggggggtggatgcaaagtttagctcctcgaaagtgagcattcntcttggaggtagaaaccttgaagtgaaggtggcaacgcctaaggaagaaatgaaaggaacttctaagaaagtcacccgaatttttgtagcaagaatcccaccgtctgtcacagaaacaatgttccggagtcattttgaggactatggagagataacagatctgtacatgccaaaggaaaaaggttctgaagggcatcgtggtattggatttatcacttttgaaagctcagaagctgtagataccttgttggcagacactcatgagcttggtggttcaactgtagttgttgatcgtgctactcct

SEQ ID NO: 3832 - DNA, 387 bp, Lilium asiatic
  Clone ID: LIB3230-013-P1-K1-B1
gcaactttctgttgctgagatcacaaacactgcttttgagccttcttcaatgatggcaaaatgtgacccccgccatggcaagtacatggcctgctgcctcatgtatcggggagatgttgtccccaaggatgtcaatgctgcagttgccaccatcaagaccaagcgcaccatccagtttgttgactggtgccctactggatttaagtgtggtattaactatcagccgcctactgtggttccgggtggtgaccttgccaaagttcagagggcagtttgcatgatctccaactctaccagtgttgccgaggtgttctctcgcattgatcataagtttgatctgatgtatgcaaagcgtgcttttgttcattggtatgttggtgagggtat

SEQ ID NO: 3833 - DNA, 247 bp, Lilium asiatic
  Clone ID: LIB3230-013-P1-K1-B10
gggacgcgtgggcgggaggctgagtagtcaaacatgagaagggggcgacgagagaactattattagagtaagaggagtggacggtcagtagagtacaaatccgatgacaatcaaaggtgaaaaatatgaagtaatgctagattgcgaaggactacaacctaggtgtcttaaacctatcatttttttctgagagagttaatcaccttctggtttgatactgatactgcggtttataaatccctatatt

SEQ ID NO: 3834 - DNA, 187 bp, Lilium asiatic
  unsure (1)..(187): unsure at all n locations
  Clone ID: LIB3230-013-P1-K1-B11
cccactcctacccccacacgcacaatacaccaaacatgcgaacaaaaggagagaccatcattttgtgttactcacccacacagacactaanaaaactcacataacactacaaacaaataatagaacaaaccaacaaaatcaaaaaaaataaacaaagtaatgcccaaaaaaaaccaaaagcaactac

SEQ ID NO: 3835 - DNA, 371 bp, Lilium asiatic
  Clone ID: LIB3230-013-P1-K1-B12
atcattcaatgcatcactcgtccacggtgctccagcctttcacagctggtcatgccactccttttgagcacctaatgttgtgtgcggtgatgtctgctcctctccttggagcttacttgatcggatgtggatcgataagcttgatatatggctacgttgttgtcttcgatttcttgaggtgcatggggcactctaatgttgagattttccgtcccgagctgttcgaggctctcccggtgcttcgctatctcatttatactcccacataccatagcattcaccatgtagacaagaacaccaacttttgcctctttatgcctatttttgatgtgctgggagggacacttaatgatatgtcatggaaagtacat

SEQ ID NO: 3836 - DNA, 242 bp, Lilium asiatic
  unsure (1)..(242): unsure at all n locations
  Clone ID: LIB3230-013-P1-K1-B4
ggcggggttnnacaacaccgncactggnaaaaccctgtccagacccaacttaaccgacaaacagcacatcccccgccccccnnttttctttttcccccaccaccaccacaccaaacacccttcccaacaaatacacaaccctaaacaccaatactacacccccaatacctacacataaaaccctccaaacaaaaccacaactctcagcatcacccccacacttaccaactccccaacaccca

SEQ ID NO: 3837 - DNA, 369 bp, Lilium asiatic
  Clone ID: LIB3230-013-P1-K1-B7
cattaaatgcatcactcgtccacggtgctccagcctttcacagctgggcaggccactccttttttgtcgcctaatgtagccgccgcgatttctgcttctctccttggagcttacctgatcggatgtggatcgatcagcttgatatatggctaccttggtgtcttcgatttcttgaagggcatggggcactttaattttgaaattttccgtcccgagctgtttcaggctcttcccgtgcttttctatctcatttattcccctacataccatagcatttaacatgtggaccacaacaccaactttttcctttttatacctatatttgatgcgctaggaaggacacttaatgatatgttattgaagttacat

SEQ ID NO: 3838 - DNA, 380 bp, Lilium asiatic
  Clone ID: LIB3230-013-P1-K1-C1
tgggtgagtgaacttgtgagctgcatcagattctgaatgatgaggcctctttggtgggtgaacttctagctctacactcggcactcggatctggagcggctcttcagcaagcatggaagggtggatcgcgtcgacatgaaatctggttatgcttttatatatttcgaggatgaacgtgatgctgaatctgcaattcgcaatcttgacaatgtgccttttggtcatgataggcgtaggctgtctgttgaatggtcgaggggggaacgtggaccacgtcatcgggaaggctcttggtcaacagggaatacgaagcccaccaaaacactgtttgttataaactttgacccaatccgaacacggtctcatgacatcgaaaggca

SEQ ID NO: 3839 - DNA, 304 bp, Lilium asiatic
  unsure (1)..(304): unsure at all n locations
  Clone ID: LIB3230-013-P1-K1-C10
cccacgcgtcctcatctccaccgttatattgtgtatggagagtccatccaagaggaattcgagcattgggggaggcttacaaatccanccaccaccgcagtccaacaagctatacatgggcttgcatacaccgtctatggcaagcctgatgtgaggcgtctgatgtttgaggtctttgattttgagcaggtccaaccgaaagaggtatgaggccagaatgttcttgcttcttgctcaattcttcccagtggaatatcattacaccaatgtaaggaaagcatcctctttactgttttctgatcct

SEQ ID NO: 3840 - DNA, 365 bp, Lilium asiatic
  Clone ID: LIB3230-013-P1-K1-C11
cgggtttgtgaggtatagcaatcattctgaagctgctgcggctattcagattgggaatgctcgtgttctttgtgggaagccaatgaagtgttgctggggcagcaagcccactccagtcggaacaagctccaatccacttccccctcctgcagctgcaccctttcctgggttttcggctgcggacctgctggcctatgaacactccttggctttgagcaagatgggctctatgcacccccaaggtcagcatgccctcaagccagctgctattgggatgggtgctggagctagccaggctatctatgatggtggttatcccaacgccttctcatcgcatcagcagtacatgtattattagtgctttt

SEQ ID NO: 3841 - DNA, 376 bp, Lilium asiatic
  Clone ID: LIB3230-013-P1-K1-C2
caccatgaaagatttcccaccgtgagatggagctctagaggcttccaccgcaccggatgcatccttcccccgtgtgcatgagctcgtgtgctccacctccggccctatataagaagacgaagcttgcttgtttgaagagtcggcaatctcttggaggcttgggaggtgtgcttgacattggagagatcttttgaggtttgaggagtttgatggcttcgaagtgtggaaagctcataaggtgttcgatctatgtcctctttgagttttaatgtttcattgaagttatttgtttcatgttcgaggatggaattcaagggcctagaacttttcattgatttatatgttgtgtatcttggcttgattaatttaaatttat

SEQ ID NO: 3842 - DNA, 113 bp, Lilium asiatic
  unsure (1)..(113): unsure at all n locations
  Clone ID: LIB3230-013-P1-K1-C3
cacaagacngtgaccgcgatggatgtggtgtatgcgctgaaagaggcaggggaggacgctgtacggcttccgcggctgatgggtttggtcttctgcaagtattagtggtgctg

SEQ ID NO: 3843 - DNA, 378 bp, Lilium asiatic
  unsure (1)..(378): unsure at all n locations
  Clone ID: LIB3230-013-P1-K1-C5
ggcaatctatctttggggtttcgtgtttgtgttgaccattttattgatgacgctggatcccattcttatagctcctctctttaacaaattcacccctcttcctgaaggagaattgagacaggagattgagaaacttgcagcctcccttggatttnctctgaagaaactctatgtgattgatggttctactagatcgagccacagtaatgcatatttgtttggatttttcaagaacaagcgtatagttctctatgatacattgttagaacagtgtaaaaatgtggatgaaatagttgcagttattgcacacgagcttggacattggaagctcaggcatacattgtattctttcatcaatgcccagattctcacatttct

SEQ ID NO: 3844 - DNA, 381 bp, Lilium asiatic
  Clone ID: LIB3230-013-P1-K1-C8
caggcaagtgcttgacccagaaaactatggtaaagaagccaaagaagggatctaagaatactaagcccatcacaaaaacagagcagtgtgagagcttcttcaatttttttagccctccggaagtccctgatgatgatgctgatattgatgaagaagaagctgaagagctacaaaatcaaatggagcaggattacgacatcggatctactatccgagacaagatcatccctcatgctgtttcatggttcactggagaggctgctcaggatgatgaccttgtcgactttgaagggggtgataatcttgaagatattgatgaagaggacgaggacgaagatgatgacgatgaggaggatgatgaagaagaagaggaagacgatg

SEQ ID NO: 3845 - DNA, 309 bp, Lilium asiatic
  Clone ID: LIB3230-013-P1-K1-C9
aggagacccgcggggtgctcaagatctttcttgagaacgtcatccgcgatgccgtgacctacaccgtgcacgcccgccgcaagacggtgacggcgatggatgtggtgtatgcgctgaagaggcaggggaggacgctgtacggcttcggcggctgatgggtttggtcttctgcaagttttagtggtgctggtgactgtttccttatgttgttgaatgttaatgctaagttggacttctgttatgtctcctgtaaaattatcagatttctcatctgatattgaattggaaaatttttctgttgcggtagtg

SEQ ID NO: 3846 - DNA, 378 bp, Lilium asiatic
  Clone ID: LIB3230-013-P1-K1-D12
cactattcaccccgtcttttggtcaattgaatacttagatacacatagtttttaatatttggcagtgttctttcatctgccatattctattcatactacagtatgccagatttgttgtttgcactctcagaaaagggatactgtaaagtgacaattctcttacctttatccaagtgccagcatatacttggaacacattttatctgcagtatcctcgttccttgtattttcttttagaattctcactagcgcaagggggctttggtctatatagattatatattatattaatattattattacttatcaaataatttgaaaaaatatcagttgcgtagagaattctttgctggtggtcccacatatttttcccgattt

SEQ ID NO: 3847 - DNA, 114 bp, Lilium asiatic
  unsure (1)..(114): unsure at all n locations
  Clone ID: LIB3230-013-P1-K1-D5
cggatccccactcctagtcaatcatccagctggagaaaatggcagatatncgatcgtttgctcataccgtgcgatctcacngaancaagangncaaggtttcacatacattact

SEQ ID NO: 3848 - DNA, 343 bp, Lilium asiatic
  Clone ID: LIB3230-013-P1-K1-D6
gttgaactggtatcttttgttaaggaaaaagaatcatgggatttgaacactacgggaaagattgaagcttctggtaaaaagaaggaagagggcaatgcattgctcaaattgggtaaatatgctcgggcctctaagagatacgaaaagggagttaaattcatagagtatgatacctccttcaatgaagaggagaagaagcaagctaaggtgctgaaggtctcgtgtaatctcaacaatgcagcgtgcaagctgaagttgaaggactacaaggaggcacagaagctttgcactaaagagttggaaattgaaagcgggaatgtttaggcctagtacaggagagctc

SEQ ID NO: 3849 - DNA, 382 bp, Lilium asiatic
  Clone ID: LIB3230-013-P1-K1-D7
gagataaagaacaagaggcagttggaccgctacctacgtgatcatcccgggggtccatctttatctgagtttgattggggatctggtgacaccccaaggcgttcctcaagaattagtgagaaggtaaaggctatagagagcccagaagatgagaagccgccaaagcgagaaaggaaatcaagctcgaagaagggtgccaaagagaaaaaagatgggggtgatgcgcctgaagcagaggatgatacatctacaactaaaagcagacttctcgctgatatcgacatggaagagtccgagaatgttgcagatgcctcttcagagaaggccaaagaagtggagttggaggaaccggagaatgttgcaggtgcctctacaggcaagg

SEQ ID NO: 3850 - DNA, 215 bp, Lilium asiatic
  unsure (1)..(215): unsure at all n locations
  Clone ID: LIB3230-013-P1-K1-D8
gaagggggggtcgacctcaacgtccgnanataaanaacaancaacagttgcacctctacctacgagaccaacccggaagtccatctatattcgtcgtctaacccccccacccaccacacaccccaaatcattccctcaacaactactaactaacaacaacactacacagaccccacacaataataacccaccaaacctaaaaaaaaaaccaacct

SEQ ID NO: 3851 - DNA, 250 bp, Lilium asiatic
  unsure (1)..(250): unsure at all n locations
  Clone ID: LIB3230-013-P1-K1-D9
gagataaagaacaagaggcagttggaccgctacctacgtgaccatccggggtgtgcatctttatcgtagtttgatccccgacccggngacaccccaaggcgttcctcaagaattagtgagaaggtaaaggctatagagagcccataagatgataagcctccaaagcgagaaaggaaatcaagctcgaacaagggtgccaaagagaaaaaagatggcagtgatgcacctgaagcatatgattattcatcta

SEQ ID NO: 3852 - DNA, 209 bp, Lilium asiatic
  unsure (1)..(209): unsure at all n locations
  Clone ID: LIB3230-013-P1-K1-E10
cccacacttccgtttttttttttttttttttcatctaattacccacacacaagttcaacacatatgtattcccaccccccaaaacanaaccaaaaaaaaatctcccccaaccaaaaacaaaaaaacaaaactaaaaaaacacaccacaaataacaaccaaaaaaaaaccaacccccaactacacacaacaaacaaaaacccaacaacac

SEQ ID NO: 3853 - DNA, 366 bp, Lilium asiatic
  Clone ID: LIB3230-013-P1-K1-E2
aagcacattcggatgacctgcttgggcaaccgggggttgctcatgctgtcgttgaggtcgatgcggatgaaccgcctggtgacctatgatgcggtgaagagggagtggcggaaggtgcctgaatgtgtgcttccccatggcaggaagagtcggtggattgcgtgtggcacagcgttctacccctgccctactgctacagcataaccggttccgtcactctatggttcggtttttgttgttttatggcatgtatgattatgtgtgtatggacctagatatggtgtgataaacttgagtattgtggacctgtggtaatgttttttttacggaaataatggtttttaggtaatggtttttaatgatgtt

SEQ ID NO: 3854 - DNA, 372 bp, Lilium asiatic
  unsure (1)..(372): unsure at all n locations
  Clone ID: LIB3230-013-P1-K1-E3
ccgaagcacattctgatgacctgcttggttttttttttgttgctcatgctgncgaggatgtttattctgatgtgttgcggggtgacctatgatgcggtgaagagggagtggcggatggtgcctgaatgtgtgcttccccatggcaggaagagtcggttgtttgcgtgttgcacatcgttctacccctgccctactgctacagcataaccggttccgtcactctatggttcggtttttgttgttttatggcatgtatgattatgtgtgtatggacctagatatggtgtgattaacttgagtattgtggacctgtggtaatgttttttttacggtaataattggtttttggtattggtctttattgattttaat

SEQ ID NO: 3855 - DNA, 320 bp, Lilium asiatic
  unsure (1)..(320): unsure at all n locations
  Clone ID: LIB3230-013-P1-K1-E5
gaaaggccatgacggagcggcgagcgagactcttctatgggcnntccggcgaaaggaagggccaggagcatgtggcggcatcccggattctttgtgcccttcacaagaagtatctctctcccgagacatagggtctccacaccatcgctcaaactaggaatggaagggcatggatcactcangatgatggtgcagagagaggatatctcagggacgatgctcgaggatcgtgagcgcaggcacttcagctctaaggacaaattttcagaggatagggatcgtaggaaaggtccagggcaccttcttctggaaggtgttaa

SEQ ID NO: 3856 - DNA, 314 bp, Lilium asiatic
  unsure (1)..(314): unsure at all n locations
  Clone ID: LIB3230-013-P1-K1-E6
cggacgcttgggcggacgcgtgggtttagaaaccataaaagagttcacaatcagtatcgtgtttatgttactttattactttgaggacaaagtaaattttaagtgtgggggatatggtcagatttaacgaaataatcttttatatgatgcataactgggttctttaagaaaaatccacgcttgccctcaaagtgcatgcagtgtgataaacacgatactgtttgacataactntaattgactggcctccctctcctacgcccacgctttggaaaccgcgtgggtggtcaagttaattccgttccgtgacatgcc

SEQ ID NO: 3857 - DNA, 357 bp, Lilium asiatic
  Clone ID: LIB3230-013-P1-K1-E7
caaatccccaatccccaatcccctctgattccccctgatggcgccgaaatctgtgaagaagcccgttttgaagaagccggtggcggagaagcccgccgccgaggaggagaagaagtcagccccggcaccggcagcggcggagaagaagccggtcgagaagaagcccaaggctgggaagaagctcccggccaccaagggcaaggagggggagaagaagaagaagaggtcgaagaagtcggtggagacctacaagatctacatcttcaaggtgctgaagcaggtccaccccgacatctgaatcttcagcaaggccatggggatcatgaacagcttcatcaacgatctcttcgagaagat

SEQ ID NO: 3858 - DNA, 376 bp, Lilium asiatic
  Clone ID: LIB3230-013-P1-K1-E8
cggacgcgtgggcggacgcgtgggctgacgcgtggggttttcatgggttcaagggaagtacctcattttgtgtgacatcattaaagttcctactgcacattatgaattcggggccaattttttggatccaaagttgattcttgtgggaagggttatgactgacgggaggctaagtgcccgagtcaagtgcgatttgactgataaccttactttgaagatcaatgctcagctctcaagtgagccccatttctcccagggcatgtttaacttttattacatgggtaaagattacaggactcactttcaaattgtgaataatgcctttctatggttgccaactatatccatagcgttacaccatatttatcataggtca

SEQ ID NO: 3859 - DNA, 380 bp, Lilium asiatic
  Clone ID: LIB3230-013-P1-K1-F1
gtatcatccatcgctatgattgtataaagaacatggataaaaaggacagaaaaaaagttgttcctcgggtgtgcataattggtggaaaggctgcacccggttatgaaatggcaaagaagataattaaactgtgtcatgctgttggagaaatgatcaacaatgattctgatattggtgatctcttgaagctggtttatattcctgattacaatgtctctgtagctgaactagtgatacctggaagcgatctttcgcagcacatcagcacagcaggtcatgaagcatctggcactagcagcatgaagtttttgatgaatggatgcctacttttggctacagctgatggcgccacaattgaaataattgaagaagttggagag

SEQ ID NO: 3860 - DNA, 381 bp, Lilium asiatic
  unsure (1)..(381): unsure at all n locations
  Clone ID: LIB3230-013-P1-K1-F10
gttaatgatggggagaagaaaagcaatggtaaatccattcgngctgaagtggggacaaaattttcttagaagaatgcccttccaagtattcctgccgagaagccatctctgaagacgagaccacaagatgattcagtgaggccgtctgatgatctgcataacaagggttctactggtacgaggaagcggaaaatcggttctcttgatggggattatggcaacgaattatttcagtcgaagaaggttccttctgaaaaggtgaatgttggtgagaaaaaaacattgcctgatgtttcagcaaaaatgaacaaggatgctaacacttataatgagaccgtggaagttaccagaagaccagtgactgatagaagcaagtggttt

SEQ ID NO: 3861 - DNA, 383 bp, Lilium asiatic
  Clone ID: LIB3230-013-P1-K1-F12
ggtatgtgcaagcttgcggaactcaatccccaagtctgttgtatattgtcaagtgcgcgaagcaaagaggtcactgcttgatcatttcttcacagaattaggggcaaaagagtctaagcacttgtcatctcttctggatgaggacccggctgtgatggaacgcagaactaacctggccaagagactggagttgtatagaagtgcccagtctgagattgatgcagtggcatggtccaagtaaagctgagggggctgtttctattttttccgatcaactagaattttctttaatatacgggtttttctatgctactaattgagaatgtgtttacctgtaatgtaaacttacatttgaaatcaactgtctttttgttcaaagttaa

SEQ ID NO: 3862 - DNA, 379 bp, Lilium asiatic
  Clone ID: LIB3230-013-P1-K1-F2
cttacacgtgtgatttatctgatgccaaacgtgaagccgcagcatgggatcgaatgggctcagaggggaatgtaacaaacaccatataccgtacttcacgcacaacctgcatggcctgaccaagccgatcaatccatcggctgcatcgccctcactggacacatatgagaatgtgtctgatgtacacagagacccatcgcctcccacaactatttattgtgatcacctaccaggattccatggactacacctaacacacgcgaacaaagacggtagcgctgatgaatattcatgttgccgtgtatcgccactgccgcaccctttctggctgtcaacaaagaaacagatcgggtgattctgctacatagctgttggtttt

SEQ ID NO: 3863 - DNA, 374 bp, Lilium asiatic
  unsure (1)..(374): unsure at all n locations
  Clone ID: LIB3230-013-P1-K1-F3
ccgacccactctccgtnncactngaattacctatgcctttgccaagccgagcaagcaacgaaggggctcaccttttttgtccaaacaccatataccgtactgcccgcacaacattcacgacctcgccaatccaatcaatccatcgcctgcctaagcctcactgaacacatttgataaagtgtactcatccacacaacgccccatcgtctcccactactctttaatgagatcacctaccaggattccatgacctacacctcacacacgcgaacaaagacgttaacgctgatggatatgcatctttccctataacgccactgccgcaccctttactgctttcaacaactaaccatatcgcgtcattatgctacata

SEQ ID NO: 3864 - DNA, 316 bp, Lilium asiatic
  Clone ID: LIB3230-013-P1-K1-F4
gtcacaacgatgattctgaacagggctctacagaggcgcggacgagggaggagtggggcaaagctgttctgtggccgaccccaaaacacgatacacgaagcagagcctcgaggccaccgaggagctaagcttgactccgcctacgcaggacgcaccggcaccgttggagaccgaggccatgcacgcggggggcgcgaggccacgcaccccgttgtaagggggtcacgatagaggagggcatggaaggccctgcgcagacgaagaccgtgctgtgagtgatggaagatgtggaggttgctgctagaccacactgccg

SEQ ID NO: 3865 - DNA, 385 bp, Lilium asiatic
  Clone ID: LIB3230-013-P1-K1-F5
cgaagagaaccaaaccctagaccgagatctccgatggggggcggcaacgcgcagaaatcgaagactgcgcgcgagcgcaacttggagaagcagaagaacgccgccaaagggagccaactggattctaacaagaaagcgatgtctattcagtgcaaggtgtgtatgcaaacattcatctgtaccacatcagaggcgaagtgcaaggaacacgctgaagcaaagcatcccaaatcagagctgactcagtgctttcctcatcttaaatcatcataagagtgatccaagttaagaagcatcctgctccatcaaatcaacttatgtctatatatttcatctagagttgtgtaattgaaaccttgaatggtgtggaaacaatgctgtgttt

SEQ ID NO: 3866 - DNA, 390 bp, Lilium asiatic
  unsure (1)..(390): unsure at all n locations
  Clone ID: LIB3230-013-P1-K1-F6
gcgtccgcnaagagaaccaaaccctanaccgagatcttccatggggggcggcaacacgcataagagggaagacggtgctcgagcacaaccngaacaagcagaacaacgccgccaaagggagccaactagatcctaacaagaaagcgaggtctagacaccgcaaggtgtgtatccaaacattaacctgtaccacataagaggcgaagagcaaagaacacagctcaagcaaagcatcccaaatcagagccaactcaaggctaaccgcatcttaaatcatcatacgagcgacccaaggtaagaagcatccaccgccatcaaaacaactcaaaactataaagtgcatacacagaagggtaatcgaaacctgaaatggactggaaacacagccaa

SEQ ID NO: 3867 - DNA, 282 bp, Lilium asiatic
  unsure (1)..(282): unsure at all n locations
  Clone ID: LIB3230-013-P1-K1-F7
atcacatccaccctagctcaactcactacacaaggcccaagcatagcaggaagtgcgccaatcaaattatgccaccactngagcatctccaaccagaattacaaccaaaacagcctaaacactagacatctcttctggatgaggaccccaccgtgatggaacgcataactcacctgtccaagagactgcagctgtatacaagtccccagtctgagattgatgcaatggcatggttcaagtaaagcttacggggctgtttctattttttcccatcaactaaaa

SEQ ID NO: 3868 - DNA, 371 bp, Lilium asiatic
  Clone ID: LIB3230-013-P1-K1-F9
caggagatctcctatttggagcacatccataggcgtcatgaggagaagggctggctttacccatgtttgtttgccgcatgttgctgcttctgctgggtcgagacctgcgagtgctgcctggactggctctgctgctgcttcacttgaatctggaagatctggatcagtctcctttacctagggccgagtatgtatctttgtgtgctttagaataagtagaataattcatgcagaactgctgtgttctgtttgttgggtaaatcttgtaattgggaattgatctctaagttccttctgtcttgttttcccgtgtgatatatttgttagatttttccctgtgtttgttggtgtgactaagtttcaaattttag

SEQ ID NO: 3869 - DNA, 380 bp, Lilium asiatic
  Clone ID: LIB3230-013-P1-K1-G1
gttgagagagagagagagagagagcgctccgagcatggcgagggtcctgaaggcgctgcacctcccgatttcctcagcggtgaggagaggggccggcctccacccaaagttctgccgcacgatcatcaaagtctaccaggccaatcagcatctcatcacaaacttggaaaggcgcatttatgatcagtcagctagtattgcgatcccacctctgaatgaagagaaagttgttcaagctgcatctgattttattggcgaactctttgtcctttcggttgctggaggtgttctgatctgcagcagacaaaaaagggccaggttggaagctagaaagaaggaaatatacaagcaggagtctgaggctcgcaagcagaaaatcg

SEQ ID NO: 3870 - DNA, 385 bp, Lilium asiatic
  Clone ID: LIB3230-013-P1-K1-G10
attgggcataccggagtcggggaagatgttgagggtctccagctgcaagtcactgagggtgaacagaccgcaattggaggtcggagatgcggcggaggagtcatcggcggcagtatctgacccaatctctaccggcgacggcgagagcaatgtgaggaagcgaaaagcagctcccaagggcaaaagcaaagacaccaccaagtctggagatgaggaggatttgagtgcaaagagatgccgatcggtcgaagagggtgagatcaagcccaagatggagcagaacggcggagcgagcagcagcggcaaggagagcaatgtaaagcctccagagcctcagaaagattacatccatgtcagggcgagacgtggccaagctactgataac

SEQ ID NO: 3871 - DNA, 388 bp, Lilium asiatic
  Clone ID: LIB3230-013-P1-K1-G12
aacaacacccgtatagaacccatattcttcacattagctttgacactcaccactgttttcagactgcacatatcctgttcgacaaaatgcctcgcagagtataaacctcgtggctcttgcacgctccgtcaccagatcgatccagcgaagcgagtcgacaatgtcatcacctccggcgtcgccgacggcgttcgtcgtgaacagcccgcggaggactctgagcctggtgagggagaggagggggaaggcaaaggtatccatctccgatccggaggagaaggcttccggtttcgccgcggagcacggcccaaagccaaccgaggtctatggcttcgtcggctccatcactactgtcatcaccacagtgatttatctggtgtgggcgtat

SEQ ID NO: 3872 - DNA, 337 bp, Lilium asiatic
  Clone ID: LIB3230-013-P1-K1-G2
gcattccaagtgcgagccattgttgtgtttgtttgaagcaatatacttaccaggggggggacacttgaaagcaatttttttataaaagaatatcacgcgaaaaaagcttccatataaagggtgtgattcacacttgcattggatctatctagaggattgagctatctacattcaagaaaagaagttcattttgatgtcaaaaccgagaatatgttgtttggttcccatagaaacctaaaaatcgcttatttttggggttgctcgtgttgaaactcaaaaaccctaaggattttaacggccgaaacgggtacacttggatacatggctccagaggttt

SEQ ID NO: 3873 - DNA, 375 bp, Lilium asiatic
  Clone ID: LIB3230-013-P1-K1-G4
gtgaatacgatgataatgaagagggatcaacaatggcgcggacgatgtagaaatcagccaaatctggactgaaatcgatctcaaaacatgatctaagaaaaagatcctagagtcaaacgaggagaaagattcgtccacccccagcggctgtcgacttcaacgtcggcgacctcgttcttgcgcatgaggagaaagagcttgctcatcccgtttaaagagattaaggcttgtgaatggttttgtggaacctgcgcataagaagtcggggctgtccatatctgaattagcagaggctgatggtatcccacgcatggtggtggacatccgtcatgagagttctcaccgcaatctgcctttcctttagctagcgcgact

SEQ ID NO: 3874 - DNA, 387 bp, Lilium asiatic
  Clone ID: LIB3230-013-P1-K1-G5
gagatccagaccaaattagggtttcgtcaatcctctgagatgggagtcttcaccttcgtctgtcggagctccggcgatgagtggaccgccaagcccctttccggcgacatcgaggcgtcggctgcgtccacgtacgatctgcagcgcaagctcgtccaggccgccctctccaaggactcctccggcggcgtctcttcctccttttccctcgtcactccctcctccgccgttttccaggtgatcattggtggcggtggtggtggtggaggatttgttggaggcggtggcgcatctgctggtggtgctgcagccggttcagctggtggagctgcagttgctgaggcacctgctgtggaagaaaagaaggaagagaaagaagagagtgat

SEQ ID NO: 3875 - DNA, 389 bp, Lilium asiatic
  Clone ID: LIB3230-013-P1-K1-G6
gaagtaatgaatcaaatgaaggcagacatgattgaatttttcaagcttcctcttgaagagaagaaggcatatgcacagttaccaaatagtcccgaagcctatggtcaaaccttcgttgcctgcaaggaccaaaaactcgattgggcggacatgttctacttagttactcgaccgtttgccacacgaaaaatggaactttggcctctctacccctgcaactttcaaagaaacattagataaatactcatcggagctgaagaaactcgccggtattctgtgagaatgttattgctattaaccatagggtggatccggaggctctcttaaatattttcaaggaccagtcgcaaggtgcgagcatgaactattatcccacacgttcgaaagca

SEQ ID NO: 3876 - DNA, 290 bp, Lilium asiatic
  Clone ID: LIB3230-013-P1-K1-G7
aacaacacccgtatagaacccatattcttcacattagctttgacactcaccagtgttttcagactgcacatatcctgttcgacaaaatgcctcgcagagtataaacctcgtggctcttgcacgctccgtcaccagatcgatccagcgaagcgagtcgacaatgtcatcacctccggcgtcgccgacggcgttcgtcgtgaacagcccgcggaggactctgagcctggtgagggagaggagggggaaggcaaaggtattcatctccgatccggatgagaaggcttccggtt

SEQ ID NO: 3877 - DNA, 350 bp, Lilium asiatic
  Clone ID: LIB3230-013-P1-K1-G8
aaaaattccacagaagaatcctaatagtaatattcaaacccgcattccaagtcgagcatgttgtgttgtcgtagaatatcttcctggggggacattgaagcagtttttgataaagaatagacggaaaaagcttccatataaggttgtgattcagcttgcattggatctatctagaggattgagctatctacattcaagaaagatagtacatcgtgatgtcaaaaccgagaatatgttgttggattcccatagaaacctaaaaatcgctgattttggggttgctcgtgttgaagctcaaaaccctagggatatgacgggcgaaacgggtacacttggatacatggctccag

SEQ ID NO: 3878 - DNA, 357 bp, Lilium asiatic
  unsure (1)..(357): unsure at all n locations
  Clone ID: LIB3230-013-P1-K1-G9
aaaaattccacagaagaatcctaatagtaatattcaaacccgcattccagagggagcatgttgtgttgtcgtagaatatctncctggggggacattgaagcagtttttgataaagaatagacggaaaaagcttccatataaggttgtgattcagcttgcattggatctatctagaggattgagctatctacattcaagaaagatagtacatcgtgatgtcaaaaccgagaatatgttgttggattcccatagaaacctaaaaatcgcttattttggggttgctcgtgttgaatctcaaaaccctagggatatgacgtgcgaaacggttacacttggatacatggctccagaggttct

SEQ ID NO: 3879 - DNA, 374 bp, Lilium asiatic
  Clone ID: LIB3230-013-P1-K1-H1
cctactctaactgtcgtcgctgcctttgtattcgccagctcgccgtcaaaatgaccgacgaagtccttctccatccacaccgcaggtacgctcgagctccactcctttagcagcccattctccttctccttcttccaggaccttagctccgctctcttaaccgctcattttaggtttaatggaggttgatcagtacttcatcacacgcctccccacgggactctccattaggatgcccactgcggaggagacccttaccgaagtcgccgcctctcccaactcgtggtacgcctatgcttcctttttcaaagccgggtggaatcttcctctcccaaaggccctggcggagtttctgatattggcaaaaattgccc

SEQ ID NO: 3880 - DNA, 362 bp, Lilium asiatic
  Clone ID: LIB3230-013-P1-K1-H2
catgagttgtatttggagtacatcgcccaaccacttttgttgactccagcctttatagaccaaggggatgccaatgctggcctcaatagcagcaatggaaaccgtgtgggatctccgttgcctacgggagatggtctcctagattttgatatctatatctctgagatggctgcgaatgatcatatgaagtcggagcttgatcagtacttggaggagacacttgtgcctcgagtacaggactttgatatcctgaactggtggaagctcaacgatcttaggtatccaacgctttccaagatggctcgagatgtcttggcaattccgatgtctatggtgggtcccggattgcctgtatttggtgc

SEQ ID NO: 3881 - DNA, 389 bp, Lilium asiatic
  Clone ID: LIB3230-013-P1-K1-H4
cacccaatggtaaggcagttctacacactggagattttcgtttttctgaagaaatggccaaatctttccttttgcagtcatgtcatgtccatacactcattcttgacaccacttactgtaaccctcagtatgactttcctaaacaagaagcagtaatacagttcgtgattgaggccattcaagcggaaaccttcaatccaagaactctcttcttgattggtacctatacaatcggaaaagaaaggctctttgtagacgttgctcgtctactgaaaaagaaaatctatgtcgggcacgcaaagctctctctgctgaggtgcttggaggttcctaaagaggacatgcaatggtttactgcaaatgagatggagagccatattcatgttgtc

SEQ ID NO: 3882 - DNA, 386 bp, Lilium asiatic
  Clone ID: LIB3230-013-P1-K1-H5
gcgacgccgggtggaggtgccatgtttaccacctcagagagtgtgccatgaaagaaatgcattcttcacgttcagttggtagagtggataacgctgagaagcgataacactgagtatgagactaattatagtcatctgagcaatgggcgcaaatgtttcctcatagtcaatctcgtgctgctgagtgaagcctcaagtgacttgtcaagacttttgtcgctccacttggccatcaggtcgatacttgatcttgtagacctatctgctactgacaggtgtcacacctaggagacaagaaacaacatcccatgtgtatgtccacgagaagactcgatgctccttgtccatggcccgataccactggttactcttaactacctcccggt

SEQ ID NO: 3883 - DNA, 366 bp, Lilium asiatic
  unsure (1)..(366): unsure at all n locations
  Clone ID: LIB3230-013-P1-K1-H6
agaaaccctaaccctaggcggcggcggcggcggagatggtgtcgggatccgggatatgtgtgaagagggtgtgtggtggacncgcgccaccacatgctgggccggctggcatcgatcatcgcaaaggagctgctgaacgggcagcgggtagtggtggttccatgcgaggagatctgcctctccggcggactcgtgaggcagaagataagtatctacgctttctccggaagccggtgaacacgaacccgtcgcacgggccgatacattttctagctcctgcgaagatcctgtggcggacaatcccagggattatccctcacaagacgaagccgggtgccgccgcgctgacgaggctgaacgcctact

SEQ ID NO: 3884 - DNA, 367 bp, Lilium asiatic
  unsure (1)..(367): unsure at all n locations
  Clone ID: LIB3230-013-P1-K1-H7
ataaggttgaacatctaaagcacaaacccaagtgtttgctacaaaccagtgaggacggagagtttgtttttcatcccnaaatagaagcaangaaaacaagaaagcatcttcccctccaaacctacatgagctacccaataataaataggcccaatattcactccaactaggaaaaatcctgtaactgatcagtacttcatcacacgcctccccacggtactctccattaggatgcccactgcggaggagacccttaccgaagtcgccgcctctcccaactcgtggtacgccctatgcttcctttttcaaagccgggtggaatcttcctctcccaaaggccctgtcggagtttctgatatcagcaaaa

SEQ ID NO: 3885 - DNA, 310 bp, Lilium asiatic
  Clone ID: LIB3230-013-P1-K1-H9
cccatgcctcgggatgattctcatccattcagaaatgtggctccgtctgttcctactcctactgatcctactcctgcaggaaaaagttctttagagaatcctcagttggagttcgaagcaaaatctgttagagacggggcatggtatgatgtcgcaagctttctatcccatcgaatgtttgaaacaggtgacccggaagttcgggttcggtttacaggctttggagtggaagaggatgagtggattaatgttcgcaagtatgttagaccacgctctcttccatgtgaagctggggaatgtatcatagtac

SEQ ID NO: 3886 - DNA, 376 bp, Lilium asiatic
  Clone ID: LIB3230-014-P1-K1-A10
ccaaattcctgggtcaccccagatgtctcgtttcccaaccctcccagatatgtccccaaagaaagtttcagcttctcataacatttatgtttcacctttgcggcaatctaagatgctttctccaagctcaaaaagttactatgcatgtgttggtgaaagcactcatgcatatcagagcccctccaaggatctgactgccatcaacaaccgcctgaactgtggtagtggtcggaaggttaatgggagactcaactttgatgtggtgagcgattctgttgtggctggcagtcttggccctcaaaatgtcagttcggcatcttcagctgttacccgctccttgaactcgattgtgaaaagtgagccatctgactcgtaa

SEQ ID NO: 3887 - DNA, 367 bp, Lilium asiatic
  Clone ID: LIB3230-014-P1-K1-A11
gaaaagaattgaagctaagaagggcgatggcctggcagacaattcaacggatttgaagttatctgacattcatcttaatatttgaatgccaaacggcaacgtgattcaggccacttttagcaaagcagatactctgttataggtgagaaattatattgatgaaaatcaaactagtggaacaagcacttacgatctagctgttccatatccgcgaaaagtgttcaatgagcaagacatgtcgagttctttatctgaactgggctttgctagccggcaatcattgatagttgttccccgtaatataactactggatgtccgagggggctatcactgaatgaaggcggaactgattccagtaaaaacact

SEQ ID NO: 3888 - DNA, 266 bp, Lilium asiatic
  Clone ID: LIB3230-014-P1-K1-A12
agatcacgagcgatggcggagacccgcagcctgatcaaggctagcgcggcggcggcgccgctttgctccaccgcgcgctgccatcgcctcttgccgccccccaccgccgcccgcttccccctcctcgtacggaggggcggcggagttgtggcggcgcgggtgatgtcggtctcctccgcctcaaccttcgtgaccgccacattcggcgctcggatggaggaatcggtgaagaagacggtgacggagaaccccgtagtcatatactc

SEQ ID NO: 3889 - DNA, 178 bp, Lilium asiatic
  unsure (1)..(178): unsure at all n locations
  Clone ID: LIB3230-014-P1-K1-A2
tcggaaaatgttgggcggtatgaatattgggaaacatagcaaaagttgtgagaccggtgattatttttttttaacccggaccatgtaccaaaaaaatttttaatagtgtaaaataaaataccggacccgaaatttganaggatatggtaagtaactacaggagtatttactatttttt

SEQ ID NO: 3890 - DNA, 379 bp, Lilium asiatic
  Clone ID: LIB3230-014-P1-K1-A5
cggacgcgtgggcagatgccttcatatgtcccctcttgcattttggtcacacttaaacaactaattttccatgctaaaaaaattattgcagcggtgtgacgtggaggtcatgggtttgaacggaaacatctctactagctagctggagtatggccgcatgcatctggcccttcagttaccctgcaggggcctcgggcactggttgccctttttcttttcctatatttaaaactattttcagatgccttcatatgtcccctcttgaattttggtcacacttaaacaactaattttccatgctaaaaaatttattgctagatttctaatacgagttataattgttagtgtatgtagatatgatctgcttttcactttgtca

SEQ ID NO: 3891 - DNA, 138 bp, Lilium asiatic
  Clone ID: LIB3230-014-P1-K1-A6
ctttagtagcgcaaaaaaataaacatactggattgtaatgtcacagaacaagagagcatgattaaaacaataaaggtacaacatgttcaaaataagatagctagcacacacacgaaactagatagcttataagatgct

SEQ ID NO: 3892 - DNA, 301 bp, Lilium asiatic
  Clone ID: LIB3230-014-P1-K1-A7
gcttttgaatgcttctatgcatcatggatacattgcgattgttgtgcgaccttggatcagctgtgtatacatattcgctgtgtggaaattgtatgtttaattgatggaatcaggcaatgtatatagatattgagaggcctgccaatctttgggtgagtattgacgactttttctgaaccggtactaatcaaacgttctttctccatggcatgtaacaccaatgctgcaactggaaactgtgagcttgcaaaaaggatggatatggtccacctctaaaaaagaacagattgggtatatctct

SEQ ID NO: 3893 - DNA, 346 bp, Lilium asiatic
  Clone ID: LIB3230-014-P1-K1-A8
cacagtgttgggcggacgcactgcgtgaagctcgtgcaccgcctctacccggaagtagacccagagctgaacccggaccatgtaccacacatgttgaagaagtgtcacactgagatcccggacccgaaggcggtacagtacgtccgcaacgacaggggcacgccgatggtgctggacaacaactattaccgcaacatccttgacaacaaggggctcttgctggtcgaccaccagctcgcctatgataagcgcactcgcccatatgtgcttgaaatggcgaaaaggcaggaatacttttttaaaggggtcaacaagggcattaaaaatcttactgagaataacccct

SEQ ID NO: 3894 - DNA, 322 bp, Lilium asiatic
  Clone ID: LIB3230-014-P1-K1-A9
cacagtgttgggcggacgcactgcgtgaagctcgtgcaccgcctcgggccgggggtagacttatattttaacccgtaccatgtaccacacatgccgaagaagtgtcacactgagatcctggacccgaatgcggtacagtacgtccacaacgacaggggcactccgatggtactggacaacaactattaccgcaacattcttgacaacaaggggctcttgctggtcgaccaccaattattctatgataagcgcactcgcccatatgttctaaaaatggcgaagagccaggagtacttcttcaaagagttcaacaagggcatta

SEQ ID NO: 3895 - DNA, 378 bp, Lilium asiatic
  Clone ID: LIB3230-014-P1-K1-B10
gcggatgcagaaccttatgattctactatccatggtaacgatgaagttggtgacaagtgtgacgaagtgacaagttatgttggtacatcattatctgaacctgctgaagttgtggaagtgactgctatggaagtgactgctgaggaagatcttgaaggtcctaaaattaattctgaagttgtggaagtgactgctatggaagtgactgctgaggaagatcttgaaggttctaaaattaattctgattcaaacaccatgccttttgttacttcagaagaggaattaaccatgcaagctgcgaatgcagaacctcgtgaatctgctggacttggtaacaatgaaggtgaccaccaatgtaatgaagtaacaagctatatt

SEQ ID NO: 3896 - DNA, 360 bp, Lilium asiatic
  Clone ID: LIB3230-014-P1-K1-B11
gcggatgcagaaccttatgattctactatccatggtaacgatgaagtgggttgcaagtgtgacgatttgacaagttatgttggtacatcattatctgaacctgctgaagttgtggaagcgactggtatggaagagactgctgatgaagatcttgaaagatctaaaattaattatgatggtgactaaacgactgatatggaagagactgctgatgaagatcttgaaggagataaaataaattctgactcaaacacaatgccttttgttacttctaaagatgaattaaccatgcaagctgctaatgaaaaaactatagaatatgttggacttgataacaatgaaggccaccaccaatgaaat

SEQ ID NO: 3897 - DNA, 382 bp, Lilium asiatic
  unsure (1)..(382): unsure at all n locations
  Clone ID: LIB3230-014-P1-K1-B12
ancggcggatgcagaaccttatgattctactatccaaggtaacaaaaaagtgggtgagaaatgtttttgtattgtcaaggaatataggaacatcattatctgaacctgctgaaattgaggaagggactgctatggaagagactgctgatgaagatcttgaaagatctaaaattaattatgaaattgacgaaacgactgatattgaagtgactgctgatgaatatcttgaaggttataaaataaattctgatttaaacaccataccttttgctactttagaagaggaaataaccatgcaaactgttaatgcaaaaactctaaaaattcctggacttgataacaattaaagtgaccaccaatgtattgtaaaaacatgctatat

SEQ ID NO: 3898 - DNA, 386 bp, Lilium asiatic
  Clone ID: LIB3230-014-P1-K1-B2
gtgatggttctggtggttcagaagatggagatttttctagtgctttggatgaattcttacaagtagttatggcaaccattggttttatatttgtgtacgttatgctgatcagaggcgaagaactgacacggcttgccagggactacataaagtacctctttggggggaagatgagcatgcgtttggaacgttgcatgtccgactggaggaagttctacgacagtatattatggataccaccaagagaggactggctggaaagagcgattgttgctacgcccacatggtggtacaatccgaggcaattgctccgtatgatgcaagagtcttcgaggaaatcacacgatgatgatagctaagacctcctttttctttgtatcatactc

SEQ ID NO: 3899 - DNA, 389 bp, Lilium asiatic
  Clone ID: LIB3230-014-P1-K1-B3
gtgatggttctggtggttcagaagatggagatttttctagtgctttggatgaattcttacaaggagttattgcaaccattgggtttatatttggggaccgtattgcggtccaaggggaaaaacagacaccggttgtggggggctacataaagtacctctttggggggaagatgagcatgcgtttggaacgttgcatgtccgactggaggaagttctacgacagtatattatggataccaccaagagaggactggctggaaagagcgattgttgctacgcccacatggtggtacaatccgaggcaattgctccgtatgatgcaagagtcttcgaggaaatcacacgatgatgatagctaagacctcctttttctttggatcatactcttg

SEQ ID NO: 3900 - DNA, 377 bp, Lilium asiatic
  Clone ID: LIB3230-014-P1-K1-B6
aaaaatccgagaagccaaagcgaaggcactccagatctagatctgctgaaggaaggcattaccatgatgataaagatgtgagaaaatctgaaaagccaagacataggcaatccagatctaggtctgcagaaggaaggtataaccctgattataaggctgtgaaaagatctgagaagccaaagcatagggactccacgtatcaatattcggaagtgagacataactctgatgatgaagatgtgaaaacttctgacaagcgaaaacataggcagtccagatctagatctgcagagccaaagtacaattcttatggagaagataataaagaatctgaaaggcgaaagcaggaaggaccggtgaagatgaatcatgaaaaa

SEQ ID NO: 3901 - DNA, 389 bp, Lilium asiatic
  Clone ID: LIB3230-014-P1-K1-C1
ctcacgagattcgatgcacaagcgccgcgccaccggcggcaagaagaaggcatggaggaagaagcgaaagtacgagctcggccggcagccggcgatgacgaagctgtcgaacaacaagacggtgaggagggttcgtgtgcgcggcggcaacgtcaagtggcgcgcacttcgcctcgacacgggcaacttctcgtgggggagcgaggctgtgactcgcaagactcgcatccttgatgtgcagtacaacgcgtcgaacaatgaacttgttcgcaccaagacgcttgtgaagggtgctattgtgcaggttgatgccgcgccgttcaagcagtggtatctccagcattatggtgtggagattgggaggaagaagaaggctgctacatccaaga

SEQ ID NO: 3902 - DNA, 272 bp, Lilium asiatic
  Clone ID: LIB3230-014-P1-K1-C10
acacaagggaaatcaaactaatctgataatgaatactatctcataaacagagaatctcagacaacccaaccctttgtgtttcagtagatatcatagtcacaaactcctgcaacccatccaagatacacctactgccaacacgatgctgaataacaaaaaatgggacagataacgatacatcgattaaaaaacaaggtggagatatcactcaagctactccttattcgaatccttggcattttttcatgtcgcccgccaattgttggcggaaa

SEQ ID NO: 3903 - DNA, 375 bp, Lilium asiatic
  Clone ID: LIB3230-014-P1-K1-C12
ccacgatcctcacacaatgcgatcagggcatcaatcccatcaactgacaaaaactccacattgaataagcaggagatgtacgaactgccttgcattatggtatcggggcacttcatctcttcttcttcagtaagagttgagttttttgcctcatggagtgtttggtgacacaagttcagctactagtgagctctgcatcatttagaatattacttgaattcaactactacggagttctgcatcatgtatattattttggcgactcgtgtttgacacaagttcagcaacaaatgtttttagcatcttttctccgtctcatgagagttcaagaaaaatcgataaatgtggcctttcacatgtcagtgaccaaacatt

SEQ ID NO: 3904 - DNA, 324 bp, Lilium asiatic
  unsure (1)..(324): unsure at all n locations
  Clone ID: LIB3230-014-P1-K1-C2
aaaaanaaaggggggacggcgcgttcgacacgcgatccatgcacaaacgcttttccaccggacgcaagaagaaaacatggaggcgaaaacgaatgttttttctcgacccacaaccaccgatgacgaaactgtcgaacaacaagacagggaggagggttcgcgtgcccggcggcaacgacaagtggcgcgcacttcgactagacactggcaacttctcatctagtaacaaggctttaacacgcaagactcgaatgccggcacagcaatacaacgtcgtcgaacaatgaactatttctcaccaagactcttgtgaagggtgcctat

SEQ ID NO: 3905 - DNA, 304 bp, Lilium asiatic
  Clone ID: LIB3230-014-P1-K1-C3
gggagtaccaatggagatgataacgaagttggttccggcgcatgcaaggaagcagtgtcctttcctgggtttgtaatgtgtttgttgagacgatgctatgaatagcacttgtacctatctatctgaggaatatggaaaatgtgttatgagtttgtttagttgattatgtaatctcatgatatcttgtacaaggcagattctgaaaggtctgcccccgagtctatttttcgctgactatgtttgttatcatccatatacgacaaatttataatattaacagagaaagtttgcctttgttgaaaaa

SEQ ID NO: 3906 - DNA, 380 bp, Lilium asiatic
  Clone ID: LIB3230-014-P1-K1-C4
accgaattgacattggtgacccattacagtagcgtactccaattatagcaattgttaactggttttctatatttttgttataatacttttaggctatcgagattaatctctctcacacacacatctattgcttaaatttatccttttaccaatatagtaatatactccaatattagcaattatttattggttatctatattttagttataatacttccaggctatcgagattagtctctctctcacacatgttgctaaaatttgcactttcaatttttaggaggtgactattttttcgtctagacggccaattgaaatgattaatgactggtactagtaccttttgtacatttcactcatataaagcagaaacccaccat

SEQ ID NO: 3907 - DNA, 381 bp, Lilium asiatic
  Clone ID: LIB3230-014-P1-K1-C5
tctgtacaaagctccctcggatggaaagtggggagagcatgagcttgattatgtgctcttcatcgtccacgatgttaaactgcatccaaaccctgatgaagttgctgatgtgaagtatgtgaaccggggtgaattgaaagaacttctgaggaaggctgatgctggcgaggatggggtaaaactatcaccctggttcaagctggttgtggataacttcctgctaaaatggtgggaccatgtcgagactggcactctcctggaggttgctgacatgaaaaccatccataagctgtgacatgaaagctactgcttgtgttacttctgtctttggaggatttaaatggatgaattaagggtatgtttgctcttagaggaaactga

SEQ ID NO: 3908 - DNA, 329 bp, Lilium asiatic
  Clone ID: LIB3230-014-P1-K1-C7
agggaattcgcggctgtcctttgtagatgatattgagaatgaaagtggagaggaggatgcagaaaatgaagaaaatcaggaagagaagtccggccgtgggcttgggaaggacccaactgtcgagacaagctttttacctgaccgtgagcgagaagcggaggaacaagccgagcgtgaacggttacggaggcaatggcttcgtgagcaggagttgattcgaaatgagccccttcaaattacctatagttattgggatgggactggccacaggagagcgatccaggttcggaaaggcgattccattggagaatttcttcgggctgttcaac

SEQ ID NO: 3909 - DNA, 204 bp, Lilium asiatic
  Clone ID: LIB3230-014-P1-K1-D10
aaaaaaaaaaaaaaaaaaaaaaggaaaaaaaaaaaaaaaaaaaaaaaaaaaaaaaaaaaaaaaaaaaaaaaaaaaaaaaaaaaaaaagaaaaaaaaaaaaaaaaaaaaaaaaaaaaaaaaaaaaaaaaaaaaaaaaagaaaaaaaaaaaaaaaaaaaaaaaaaaaaaaaaaaaaaaaaaaaaaaaaaaaaaaaaaaagaaaaag

SEQ ID NO: 3910 - DNA, 378 bp, Lilium asiatic
  Clone ID: LIB3230-014-P1-K1-D5
tacggattgatctcctggtttagtcagtctgttgtcaagtttgtaggtggactgggtttgtcatggcagctctcatttggcatcctgacattgctctatttctattctcactacttcttcgccagcggagcagcacatatcggagccatgttcactgcgttcttgtcggttgccagtgcgttaggtgccccgcctctatttgcagcaatggtccttgcaatcttctctaatcttatgggtggtctcacccactatggcattggctctgcacccgtcttttatggtgccaactatgtccccctcgcacagtggtggggctatggtttcctcatttccatcgttaacattgtcatctggcttggagttgggggattctgg

SEQ ID NO: 3911 - DNA, 313 bp, Lilium asiatic
  Clone ID: LIB3230-014-P1-K1-E1
caattctgacagcatttgaatcagagtatccggagttgcaaacttccattgtcccgaccggagaagctgaagcaatggtttccagatctaatgcaaccgctaaaggattaagggctgtgtctgatgccataattgcggatggaggcgcagatgtaaaagttcctacgaacttgttacccttttatgtggttataaccaaatgttaacttattcaatgatgaacaattatgccaactgctattcactcctgttatgtattaatttgaaaatcattgttgtactggagcaagaatgtgttccttgttataacttt

SEQ ID NO: 3912 - DNA, 320 bp, Lilium asiatic
  Clone ID: LIB3230-014-P1-K1-E4
aggccacattggtctacaggggaaaagatatcgcttaagaaacgtctaatcgagagggagatttatagtaacacctatgggaaagcattcggagtggatggagtgataaacatcaccagctactatgaaatactgtactatgaaatgagaactcatctatcattgtgtttgatgaacacttctaaaaaggaataaatcaatgctggtcatccatgcggccttccctggtaaagcccacactatacattcccgaaagcatacccaataactcaacctggatggggggctctataatggcgaaaagtgattttcctctaaat

SEQ ID NO: 3913 - DNA, 315 bp, Lilium asiatic
  Clone ID: LIB3230-014-P1-K1-E5
cccacgcgtgcgcttgaacagcctgtattatacgaagctctgggacttactggagctgacaccatcacttgcggattacccacattagctacttttgacgacggaccataggaggatatatactgctgcgtctccatacaacacatttgtcgctataaatgtgataaatccttctgaggacatgcttgattccttagaaaaaggaaggaagaatggacacattgggatgagatatcacaaagagggctgagacgaatgtacgagaatgacacttggaagctgtaatgcgagagggtgatgaccctggcttgtgta

SEQ ID NO: 3914 - DNA, 103 bp, Lilium asiatic
  Clone ID: LIB3230-014-P1-K1-E6
gacgccacgcgtccggcgacccgtgcgcttgtccaagatctattctacatcaaaatgggactaactggggctgagtccatgacttgcgggttacccacattat

SEQ ID NO: 3915 - DNA, 399 bp, Lilium asiatic
  Clone ID: LIB3230-014-P1-K1-E9
ccgccgccgtcggctcctccactgatctgaagccatgagcaagcttcagagtgatgtcttgagggaggcgattgcccaggttgtggccgagtccaaggttaaagacaccgataagaggaagcggaattttactgaaaccgttgagcttcagatcggtctgaagaactacgacccccagaaagacaagcgtttcagtggctctgtgaagttgccgcatattccccgcccgaagatgaaggtctgcatgctcggagatgctcagcatgttgaggaggctgagaagattgggctggactacatggatgttgaagggctgaagaagatgaataagaacaagaagctggtcaagaaacttgcgaagaagtatcacgctttccttgcatctgaagccatcatcaa

SEQ ID NO: 3916 - DNA, 264 bp, Lilium asiatic
  Clone ID: LIB3230-014-P1-K1-F11
gtgacggccaagtacaagcccccgatcatgcccatcgcaagggcgcctacggcatcgctgtcggctctgaactcggaactggggagcaggtcgcgattaagaagatcgcaaatgcttttgataataagattgatgcgaagaggacgctggggagatcaagctgcttctacatggatatgaaacgtgggcatcaagattataccactctatgcggaatgtaatgattataattgatatgagtgatgaactgactcataaatattc

SEQ ID NO: 3917 - DNA, 269 bp, Lilium asiatic
  Clone ID: LIB3230-014-P1-K1-F12
cgaccttcgacgtcatcagtgtcatcatatgggttcccgtctacgacagcattctcgttccgattgtaaggaggatcacaggcaaggaaagaggcttctacgaacttcagagaatgggaattgggctattcatatcgatactagcaatggcatcagcagcgctggtcgaaatcaggcggctacacatcgcacaagctgatggtataatccacgacaaagtcgctgtcccgatgaccattttatggcagataccacaagactttttggtc

SEQ ID NO: 3918 - DNA, 380 bp, Lilium asiatic
  Clone ID: LIB3230-014-P1-K1-F2
aatctatattcttagatcatgcaacatcaggtgctttagccttttcttccacaaagggggctactggtcatttgcttggtgcggcaggttctgtggaagctatattcactgttcttgcaatccatcatggcattgctccacttacacttaatctcgggagacctgatcctgtgtttcatgaaggattcatgccactaaatgcctcgaagaacatgccaataagagccgcactctcgaattcctttggctttggaggtaccaatgcatcactgttgtttgcaagtcctccgtagctaggtgcagccatctctagtcacaatgttggtgtttgagcggtgtaccagtgtgaggcgagtcatctttgcgttgatcatcaacac

SEQ ID NO: 3919 - DNA, 375 bp, Lilium asiatic
  Clone ID: LIB3230-014-P1-K1-F3
aatctatattcttagatcatgcaacatcaggtgctttagccttttcttccacgagaggggctactgttcatttgctttgggccgcaagttcttggggaagctatattcactgttcttgcaatccatcatggcattggctcacttacacttaatctcgggagacctgatcctgtgtttcatgaaggattcatgccactaaatgcctcgaaaaacatgccaataagagccgcactctcgaattcttttgcttttggaggtaccaatgcatcacttgttgtttgcaagtccttcctagctaggtgcaaccatctctaagtacaatgttggtgttggagcggtgtaccaatgtgaggcgagtcatctcttcgttgatca

SEQ ID NO: 3920 - DNA, 299 bp, Lilium asiatic
  Clone ID: LIB3230-014-P1-K1-F6
cggacgcgtgggacgctgtcttgatttcagctccacaaaggcagtttggataaccatgaaagccatgcacatcagttcctccctctccgtctcaccgtttaccccaacaagatgggtgcccctcaggatgagctgcaagtctcataaaagtttcttgggagctgaagaaggggatgcatgtggagtgaagagcagccgcagggtcatcctcatgctcccatgggttggtttgggatcgttgccggctttggcagcctccgggaaggggaagatcacgagcccttatgacgagaggcgac

SEQ ID NO: 3921 - DNA, 167 bp, Lilium asiatic
  Clone ID: LIB3230-014-P1-K1-F7
gcgaacaatgataaactatgtttaaaacttgccttcgcacccaaaagtggagcgaggaaactatggtgttttccacaccacacaaaaaatgggaatcctccccacgttggcaaaaccaaagaaaacgattaatttcttgaaccaaccttggatccttgcaacggttt

SEQ ID NO: 3922 - DNA, 344 bp, Lilium asiatic
  unsure (1)..(344): unsure at all n locations
  Clone ID: LIB3230-014-P1-K1-F9
acccacgcgtacagaatttgatagttagctcactgtgtagtcccagaaccaaagaggaaccggggctttttacttttgtttctctactnacgcagctgaaggatgagatcgcaaatagaaaggatctggttctcaacagtgatgtctgccatggaggaggagcagatctgtgctgtcaaggacatcgctcccaagtagactgggcctatcttgatacccgtgcataatctctcaaagtgttggtttttatctgtgtcagcaatagattttgcatgggaagtgtgttgcgccaagtatggaactcttctatatcctgtccaaactatttttattacttgtgtgac

SEQ ID NO: 3923 - DNA, 379 bp, Lilium asiatic
  Clone ID: LIB3230-014-P1-K1-G1
cccacgcgtacgggatttgttagtttgctgacttagagtggcggcaccaaggatgatctgaggctgccaactgatgatgctattgtcacgcagctgaaggatgggtttgcagctggaaaggatctggttctttcagtgatgtctgccatgggggaggagcagatctgtgctgtcaaggacattgctcccaagtagtctgggcctatcttgatacccgtgcataatctctaaaagtgttggtttttatctgtgtcagcaatagattttgcatgggaagtgtgttgtgccagttatggaactctcctttatcctgtccgaactatttttattacttgtgtgacatgagttgattattgtttgctgagttatgtgccctttc

SEQ ID NO: 3924 - DNA, 263 bp, Lilium asiatic
  Clone ID: LIB3230-014-P1-K1-G10
ttatttggtcctcctggttcaggaaaaccaatgctggttaaaacttggccacacaaacctgtgtgcattttataaacacataaaagtgcacaataacttttaaaaggggttgggcaaacgcaaaatgtatgaaaaaacagttttctttatatctaacaagattgcctctagcgtttttctcgtctatgaggttcacagcatgttggagaggcgagaaaatccaggagaacatgaggccatgcgcaaaatgaaaaatgaattta

SEQ ID NO: 3925 - DNA, 272 bp, Lilium asiatic
  Clone ID: LIB3230-014-P1-K1-G11
ggggcgacccacacatccgctatttgatcctcctggtacagcaaaaactatgcttcctaaaccggtggcagcggaaactttttctttttttattaacacatcaacgtccagcatcacttcgaagcggtttggccaaagccaaaagtatgtcaaaacacttttctcgctcacttgcaagatttcgcctaacattctcctcgtcgctgaggttgacagcatgtttaggcccccacgaaaatccccgacaacatgacgccctccgcaaaatgaaa

SEQ ID NO: 3926 - DNA, 258 bp, Lilium asiatic
  Clone ID: LIB3230-014-P1-K1-G3
aaaaccggggcggcccacgcgtccgcccacgcgtacggaatttgatagtttgctgactgagagtggcggcaccaaggtgtatcggagacattggtgggttgatgctctccttacgcaactgaaggatgggtttgcagctggaaaggatctggtactttcagtgatgtctgccatgggggaggagcagatctgtgctgccaaggacattgctcccaagtagactgggcctatctcgatacccgtgcataatctctcaaa

SEQ ID NO: 3927 - DNA, 245 bp, Lilium asiatic
  Clone ID: LIB3230-014-P1-K1-G4
caaaaggagttcaccctccacctggtgcttcggatcaagggaggtatgcagatttttgtcaagactcttacagggaagacaattaccctggaggtcgagagctcggataccatcgacaatgttaaagccaaaatccaagataaggaaggcattccccctgaccagcagaagctgatctttgctggcaagcaacttgaagatggccgcacactcgcagattataacatacaaaaagaggccaccct

SEQ ID NO: 3928 - DNA, 243 bp, Lilium asiatic
  unsure (1)..(243): unsure at all n locations
  Clone ID: LIB3230-014-P1-K1-G5
aaaaagaaaaaaaaaaaaaaaaggttttaattttaaaaaaaaaaataaaaagggaaaggggaaatttttttttttttttggnaaaaaaanaaaaaaaaaaaaaaaaataaaaaagggaaaaggaaaaataaaaattagtaaaaaaagaaaatattttttaaaaaaaaaaaaaaaaaaatttatgataataaaatagaaaaaaagtaaaaaataaagaaaaaaaaaaaaaaaaaataaaaaata

SEQ ID NO: 3929 - DNA, 382 bp, Lilium asiatic
  Clone ID: LIB3230-014-P1-K1-G7
caaatatccggaaatctatgccccctttggacctaggccacctccctccgacggaattttgcagcttgccgatcgcatcgccgctctcccccctgaagagctgaaacagattggtcctgctctccaatttaaactgaaacaaccaaagctgcagtcaatatcctctgttggtttttccatgggttctcaagccgggggcggcacagcccctgcaaaagcagaggagaagaaagctgagaagaccgcatttgaggtcaaattggagaagttcgatgctgcggcaaagatcaaggtgataaaggaggtgaggacatttacgaatcttgggctgaaggaggcgaaagagttggtggagaaggcgccggttgtgctgaagcaaggg

SEQ ID NO: 3930 - DNA, 289 bp, Lilium asiatic
  Clone ID: LIB3230-014-P1-K1-G9
gtaaaattaacttcaggaagtcgtctacattttatcagttcaggtcgagacctgaaaacgtgtgcagcagctccgaatttgtgttacaagccagcctatccaaaaatacgaaaatcaggttggaaatatgtgttttggctcttggatgaaaagatgactattcttctccccaaggtttgttggaataggagtttggctcttggaagactccaatagaaggcaacaaaggggacatatggatctataaatatgggtccttttttttcattcaggaatacaggagagatca

SEQ ID NO: 3931 - DNA, 321 bp, Lilium asiatic
  Clone ID: LIB3230-014-P1-K1-H1
acccatgcctcgggatgattctcatccattcagaaatgtggctccgcctcgacctacttggtctgattctacttttgcaggaaaaaggactttagagaatcctcaattggagttcgaagcaaaatctgtaagagacggttcatgtgtttgatgtcgcaagctttctatcccatcgaatgtatgaaacaagttaccctgaagttctggttcggtttacatgctttggagaggaataggatgagtggattaaagttctcaagtatgttagaccacactctttttcagttgagcgggggaattttttattataacttactggat

SEQ ID NO: 3932 - DNA, 378 bp, Lilium asiatic
  Clone ID: LIB3230-014-P1-K1-H10
gccgtaccaagcttgtcacatttcatggagatatgccatattcgtcgcgggaaatcattgagaaattggagctacttgatgaagaggatgtggtcggttccggtggatttggtacagtttacaagatggtcatggatgattgtagcgcatttgcggttaagaggattgatcgtaaccgtgagggatctgatcatatttttgagagggagcttgagatcttaggcagcatcaaacacataaaccttgtcaatttaagaggctactgtaagctcccgtctgccaagcttctgatatatgattacgtcgctttgggcagcttggatgattatcttcatgaacatggtcaagaaatgcaggccttaaattggaatgcacgca

SEQ ID NO: 3933 - DNA, 259 bp, Lilium asiatic
  Clone ID: LIB3230-014-P1-K1-H11
agccgtaccaagcttgaacattatattgagatatgccatattcgccgggggaggtcattgggaaattggggctacttgatgaagaagacgtggttcggtccccgggcattgatgccagtcaaaacgggcggcatcgattattttagcgcatttgcggaaaactgggtggagtgccaccaagggggatctgttcatatttgtgagaaggagcgtcgtatcttatgcaacatataccacatagaccttgtttatttaagag

SEQ ID NO: 3934 - DNA, 79 bp, Lilium asiatic
  Clone ID: LIB3230-014-P1-K1-H12
ctaaagagctgggtactgtgatgcgctcactctgtcagaaaccccaccgaggccgacctgaaagacatgataaatgagt

SEQ ID NO: 3935 - DNA, 363 bp, Lilium asiatic
  unsure (1)..(363): unsure at all n locations
  Clone ID: LIB3230-014-P1-K1-H2
cttcagaagcatgatctcgatcttatctgtcgcgcacatcangtggtggaggatggatatgagttctttgcaaacaggcaacttgtgacaatattctcagcacccaattactgtggtgaatttgataatgcgggtgccatgatgagtgttgatgaaactttgatgtgttcgttccaaattttgaagcctgcagaaaagaaaacaaagacgaactttggaagtatggctacagctaaagctggaacccctcctcctggagtcaagacttatctcggagctaaagcatgagcaatcggaggatgaactcgcctcaactgtgatcgtatcccgggtttgaactatatgcttcttctgaacattaca

SEQ ID NO: 3936 - DNA, 357 bp, Lilium asiatic
  Clone ID: LIB3230-014-P1-K1-H3
acggggagagatgaggctgttcgatccatggcccgtgttcttcaagaaggggtggggccgcaacttgccctttcttacccgcttcgggaacaccggcgcccttattaccaaagtcaacggccgccttaatggggaagacccggaaaacttgcgctttgtgcaagaacacaagaatttttttgatgataaattgaattttaccgggcctttcttttattagttgctggagaaatggagtcattagttgttggttaactctttttgggaatctctcaattttttatttaaccaataacaaaggacaaggttttaacataaggtaaattatttaactggggtcgcaaaattttggttttt

SEQ ID NO: 3937 - DNA, 388 bp, Lilium asiatic
  Clone ID: LIB3230-014-P1-K1-H4
gaccgacgcgtccggcggcaccaagcttgtcacatttcatggagatatgtcatattcgtcgcgggaggtcattgggaaattggagctacttgatgaagaggatgtggtcggttccggtggatttggtacagtttacaagatggtcatggatgattgtagcgcatttgcggttaagaggattgatcgtaaccgtgagggatctgatcatatttttgagagggagcttgagatcttaggcagcatcaaacacataaaccttgtcaatttaagaggctactgtaagcttccgtctgccaagcttttgatatatgattacgtcactttgggcacttgggatggttatcttcatgaacatggccaagaaatgcaacccttaaattggaatgca

SEQ ID NO: 3938 - DNA, 406 bp, Lilium asiatic
  unsure (1)..(406): unsure at all n locations
  Clone ID: LIB3230-014-P1-K1-H5
ccgggccgccgttccgggtcgccgacgcgtccaggcgtacgcagcgggcatcttactcctaagcatggcatcgttcaccatgactgcccccctgtgcatcggagctcacatcaatcagaagcccggcctaggccgccggactctcatcgatgccaaagctgccggagtcgaaggtcagcaggacacagtgaaggctgccggcagtgccgacaatgggagcaacgggcgtagggctgagatgtttgctgctgcggcagctgccatatgcgctattgagtcgcgtgttcaggagatggcgaatgccgtggagctgtaacgagggtcgacggaagcgataaanaagtatgctcctgtgtgcgatactatgcctactgctcgcatatgtcgttactgatgctgcttatga

SEQ ID NO: 3939 - DNA, 382 bp, Lilium asiatic
  Clone ID: LIB3230-014-P1-K1-H6
cgacatggacggcgatggttgcatcacgactaaggagctgggtactgtgatgcgctcactcggtcagaacccgaccgaggccgagctgcaagacttgttaaagaaggtgatgctgatgggaacggaaccattgatttcccagagttcctcaacctgatggcgcgtaagatgaaggacaccgactcagaggaagagctcaaggaggccttccgcgtatttgacaaggaccagaacggcttcatctccgccgctgagcttcgccatgtcatgaccaaccttggtgagaagctgaccgatgaggaggttgacgagatgatccgtgaggctgatgtcgatggtgacggccaaatcaactacgaggagttcgtcaaagtcatgatgg

SEQ ID NO: 3940 - DNA, 338 bp, Lilium asiatic
  Clone ID: LIB3230-014-P1-K1-H8
cagctccactcttcattcgagccgtcaccgtcgttgacgctgctgccgcccgccggagaaatggccggtgccgcttcttaccattaagatcatcaagaagcgcgtcaagaagttcaagatgactcagagtgatcgaaagatatgtgtcaagcaaagctggcgtatgccgaaaggtattgactcccgtgtgaggagggagttcaagggagtaactttgatgcccaacattggctacggctcggacaagaagacccggcattaccttgccaatggtttcaagaaggttgtagtttaaaatgttgccgagcttgaattgcttatgatgcataacaaggcat

SEQ ID NO: 3941 - DNA, 375 bp, Lilium asiatic
  Clone ID: LIB3230-014-P1-K1-H9
gagagagatgaggctgttcgatccatggcccgtgttcttcaggagggagtggaaccgcaactggcccttcctcaccggcttcgcgatcaccggcgccctcatcaccaagttcaccgccggccttactgaggaagacgcgaagaactcgcgcttcgtgcaggagcacaagagtgttttggatgataaatggagtttgacggtgcatttcttttatgagttgctggtgatatgagttcatagttggtagataaactctatctggtactctctcatttttctatttatctattaacaagtgacagtgttttatcatatgttaatttatttacttgggttcgaatatttttggttttttaatggaaagatctatgaact

SEQ ID NO: 3942 - DNA, 331 bp, Lilium asiatic
  Clone ID: LIB3230-015-P1-K1-A1
gtcggtgcaacagcacatacctatttggttgcacgggccaaaaagttagggctgggagttgaagtgatgcacaatgcttcactcagggatgctcttggtattttaggcttgcaactctaccatatggtgaaacaatttgtttaccattctttactgaaacatggatgaccggattgtttctaccccaagatacgcagatcttgctacgctagtactgcatactctctgactgttagatatacgtgtgaaggagccatcattggagtcatcgtgcagaggaacgaagccttatcctccaccaaactacatggcaatacacactgacgttaac

SEQ ID NO: 3943 - DNA, 417 bp, Lilium asiatic
  unsure (1)..(417): unsure at all n locations
  Clone ID: LIB3230-015-P1-K1-A10
cggacgcgtgggtgcacaaagtacggcatttggttcacagggacatcaagcctgcaaatttacttttaactctaagtggagagctgaagattactgatttcggtataagtgcagggttacagaattcaatggctatgtgtgctacctttgttggcacggttacatacatgtcacctgagagaataaaaaatgataattactcatatcctgctgatatttggagccttggattaactatacttgaatgtggtactggaaagttcccatacaacgcaaatgaagggcctgctaatctcatgttacagcttttgtcacatccatttattaagaagtatgagaaatcagacatcaacttggaagaatatgttcgtagcgttgttgattcgacacanagattaaaagatatagccgatatgt

SEQ ID NO: 3944 - DNA, 318 bp, Lilium asiatic
  Clone ID: LIB3230-015-P1-K1-A12
cccacgcgtccgcccacgcgtccttagggttcaagcggttactaaaatttggaaggaaaagcaagggcagcgaatttctagtaaatgattgggtatctgcctcaacggcttctgaaggtgatgatgatacagaagatggtcgctatctgacaaaccgatcttctgatgacttgcgaaagacaagaatgggctaccctgttgttgcttatgatgacttcaatgaaggcgaggtctaccctgaacaagttcaatctttacgcagctctattccaaaccctccagcaaactttagactacgggaagaacgtttatctggaa

SEQ ID NO: 3945 - DNA, 395 bp, Lilium asiatic
  Clone ID: LIB3230-015-P1-K1-A2
cccgcgcgtccggtttgttcaaaggaccaaccaccactgcgtcctcttggaagctctgcaggagatggggctgcggtcattataaaatctggtcttgagcgagctactgagctcttaagcaaccgtgactttgcgagcaactgcagctcgactaaccgagctttatggcaggcttctttcgatgctttcttcggcctactcacagagtactgcttacgaaaatacgagagcataacacagtcgcaggcaccgggtgtgaaagccatcaacaaggaaatgccagtcgagttactacgcgcaagccttccacataccgatgagcagcagcggaagaggttacttgattttgctcagagatctatgcctgcgagcgggtccaactctaatgggaatgg

SEQ ID NO: 3946 - DNA, 426 bp, Lilium asiatic
  Clone ID: LIB3230-015-P1-K1-A3
ggagttcgtcaatgataatttgtcgccgattcagtctggatgctgcaagccccccactgggtgcaatttcactttcgtggatgcaaccgtctggacgaagccacctggttttacctccgacattcctgactgcaatacatggcaaaacgatccatccggcctctgctatgactgtgactcctgcaaggctggagtcctcgccaacattaggaacgactggaagaaggtggccgttgtcaacatcgtcttcctcgtcatcctggtgatcgtctactccattggatgctgcgctttcaggaacaacaggaatgacaatgcgtactctgggtggaaaggatacccttgagggttagtaatcacagacatatgggcagtttgacttgcttatgatcagcattgtgtacatgttttgttctacctgcactt

SEQ ID NO: 3947 - DNA, 328 bp, Lilium asiatic
  Clone ID: LIB3230-015-P1-K1-A5
actgtttgatgttttctaagccaaagttagatgtggcgaaagaaaagcacaaggctgaagcagaagctgttggttcttcagaggggctcgcaggctttcaaaaaaaggtattctgatgtcctttataaagtagctgacatttcctttttggcgccatacaagagtaagatcatggcattgattgagaacggcgagacccaacctaatttgaccattgttatcctgctgtctattgtgagggctcttttgacacgtgccttcatgatcctcttgtttggaaagaagaatacctgagctccttgctaaccagttgtcagaatactatggc

SEQ ID NO: 3948 - DNA, 420 bp, Lilium asiatic
  Clone ID: LIB3230-015-P1-K1-A6
attcaggggaacaatacgatatgcaagtgtccatgcccatttaggtcgtacaggaagcaggagggatgatctggagtcactggcatacacactgatattccttatcagaggaaggttaccttggcaaggctatcagggggataataagagtttccttgtttgtaagaagaagatggctacatcgccagagttaatgtgttgtttctgtccacctccatttaagctttttctcgagactgtaacgaatatgaagttcgatgaagagccaaattacgcaaaactgatttccctgtttgatagtttgatcgaaccatgtgctccattgaggcctatcagaattgatggtgctcttaaggttgggcagaaacggggaagattgcttgtaaatcttgaggaagatgagcagccaaagaagaaagt

SEQ ID NO: 3949 - DNA, 424 bp, Lilium asiatic
  Clone ID: LIB3230-015-P1-K1-A7
ccatcgtatatctgaagaggagttcaggaaatctggtccatccattattaaggatgcaaacctcataattcgattggaggagaggtattttttgtgggataaagttgctcatatcattgttgggaaggccgtttttgggtcacacttttcagttgagccgaaggattcaatacctgttgagcataaggaaaccacaaacaccagagacgatgcgggcccaatttcacctacttacagccgtaggtggagattgtggtcaatgccatttaggagggcgaaatctcttcagcagagtgatagtaattcttcaaatgaggagctctttgttgattcagaatctggcttgcagaatgccaacacagagcaaatatgaaattctaatagcaatcagtctcctcgtaagcagtttctgcagacaaatatc

SEQ ID NO: 3950 - DNA, 410 bp, Lilium asiatic
  Clone ID: LIB3230-015-P1-K1-A8
tgttgtccccaaggatgtcaatgctgcagttgccaccatcaagaccaagcgcaccatccagtttgttgactggtgccctactggatttaagtgtggtattaactatcagccgcctactgtggttccgggtggtgaccttgccaaagttcagagggcagtttgcatgatctccaactctaccagtgttgccgaggtgttctctcgcattgatcataagtttgatctgatgtatgcaaagcgtgcttttgttcattggtatgttggtgagggtatggaagagggtgagttttcagaggctcgtgaagatcttgctgcactggagaaggattacgaggaggttggtgctgagtctgctgaaggtgaggatggtgaaaaacctgaagattattgagcagttacctatcgtaact

SEQ ID NO: 3951 - DNA, 402 bp, Lilium asiatic
  Clone ID: LIB3230-015-P1-K1-A9
cgggaacctgtctcacttctcccatgggtccactcacgcggcccttttttaacataccactgttccggttccggttggaatttaagggtttggccggatccaaaattgggggtttttttcttggtggtcggcattttcatgggtttgggttcaattttcttaatggtgagcggttcagtccctgccttgatttcattcagaaggttggcagtttctatggaaaaactatctaaagtagtgaacgaagaagtgcctggaaccctgtcttcgctaaagctgtcgggtttggagattaatgacttgactagccaacttgataaactaaggcaaggaatatcaggaactaaataagggaaggaaggctgagcaaaacgttttagctttaatggagttaaatagttc

SEQ ID NO: 3952 - DNA, 416 bp, Lilium asiatic
  Clone ID: LIB3230-015-P1-K1-B1
ttcggtgcaacaacacatacctatttggttgtacgggccaaaaagttagggctgaaagttgaagtggtgcacaatgcttcagtcagggatgcgcttggtatttgtggcttgcaactttaccatatggtgaaacaatttctttaccattctttactgaaacatggagaccggatagtttctaccccaagatagcaaataatcagaagcttggattgcatactctctgcctgttagatatacgtgtgaaggagccgtcattggagtcattgtgcagaggaaagaagtcttatgaaccaccaaaatacatgacaatacacactgccataaaccagctcttggaggtagaggaaatgcgcggagaatctgcttacaatgaagactcaaaatgtgttggttttggtcagcttgggaatgag

SEQ ID NO: 3953 - DNA, 308 bp, Lilium asiatic
  Clone ID: LIB3230-015-P1-K1-B10
ggctagcgggggcgatattggcgtgggatacactcactgtcaagggacggggggagctaagaaggtgaccatatccacccactaggatgatggctgccatgtcaaagcagcgggggctatatacttatcgcatatccgcctcggttatggtgcaagttaaccgcttgaggacttcataacctccgaaatacccttgctgtattaacatgatgagaagtttaaccaaccgatatatcattgctacaacacttaatggttgggcgcacctgtctgtccaggggaccaacacagaggtctgtactgcactc

SEQ ID NO: 3954 - DNA, 414 bp, Lilium asiatic
  Clone ID: LIB3230-015-P1-K1-B11
ggcttgcccgtccccttcgtcggcgagatgttcgtgctggcgagggacggcgtcgaattcgaggttgacaagatccccggcggggatcatggcggccgtgtcaaagcaaaggggactatttacttgtcgaatatccgcatggttttcgttgcaagtaaaccgattgggaacttcatagcctttgatatgcccttgctgtttgtacatgatgagaagttcaaccaaccgatattccattgcaacaacatatcaggattggtcgaacctgtagttccagaagaccaacacagagctctctactccactcattcattcaagatactattcaaggaaggaggatgcgggactttcgtccctcttttcttaaacctgatatcatctgtgagacagcacaatcgtcaacatatgggtcat

SEQ ID NO: 3955 - DNA, 415 bp, Lilium asiatic
  Clone ID: LIB3230-015-P1-K1-B12
ggcttgcccgtccccttcgtcggcgagatgttcgtgctggcgagggacggcgtcgaattcgaggttgacaagatccccggcggggatcatggcggccgtgtcaaagcaaaggggactatttacttgtcgaatatccgcatggttttcgttgcaagtaaaccgattgggaacttcatagcctttgatatgcccttgctgtttgtacatgatgagaagttcaaccaaccgatattccattgcaacaacatatcaggattggtcgaacctgtagttccagaagaccaacacagagctctctactccactcattcattcaagatacttattcaaggaaggaggatgcgggactttcgtccctctgttcttaaacctgatatcatctgtgagacagcacaatcgtcatcatatgggtcat

SEQ ID NO: 3956 - DNA, 392 bp, Lilium asiatic
  Clone ID: LIB3230-015-P1-K1-B2
gtctgtgcaacggcccaaccaccactgcgtgctctgggcagctatgcaggagatggggctgcggtcattatcaaagctgcacttgagcgagctcctgagctcttaagctaccagcactaccagagcaactgccgcttgactaaccgagctttatggcacacttctttccatgctttctttagcctactcacagagatctgcttacgaaaatactggagcttaacacagtcgcaggcacacgggtgtgaagagccctaactgggaaatgccagtcgagttactacgcgctagcctctcccataccgattagcagcacccgcagaggttactcgatttttctcagagatctatgcccgcgagcggatccaactctaatgggactggaagtggac

SEQ ID NO: 3957 - DNA, 419 bp, Lilium asiatic
  Clone ID: LIB3230-015-P1-K1-B3
gtttgttcaaaggaccaaccaccactgcgtcctcttggaagctctgcaggagatggggcttcggtcattataaaatctgttcttgagcgagctactgagctcttaagcaaccgtgactttgcgagcaactgcagctcgactaaccgagctttatggcaggcttctttcgatgctttcttcggcctcctcacagagtactgcttacgaaaatacgagagcataacacagtcgcaggcaccgggtgtgaaagccatcagcaaggaaatgccagtcgagttactacgcgcaagccttccacataccgatgagcagcagcggaagaggttacttgattttgctcagagatctatgcctgcgagcggatccaactctaatgggaatggaagtgaacccatcatttcagagtcggttccgagttg

SEQ ID NO: 3958 - DNA, 307 bp, Lilium asiatic
  Clone ID: LIB3230-015-P1-K1-B4
cggatgatgagaaagttgcagcctcgtaccgtgagaagttctggaagccaaagtatgatgtggagaaagaaaagcagaaggctgaagaagaagctgctggtttttcagaggggcttgcaggctttcagaaaaaggtatttgatgtccttattaaagtagctggcattccttttttggccccatccaagagtaaaaccatggaagtgtttgaaaaggccaggccccaccttaattggcccatgggattccgggggctaatggggagggtcctttggccagaggtttcaaggacctttttggtgggaag

SEQ ID NO: 3959 - DNA, 235 bp, Lilium asiatic
  Clone ID: LIB3230-015-P1-K1-B5
cggatgatgagaaagttgcagcctcgttccgtgagaagctctggaagccaaagtgtgatgtgtagaaagaaaagcagaaggctgaagaagaagctgctggtttttcagaggggcttgcaggctttcataaaatggtatctgatgtacattataaagcagctgacattcgctttttggcgccatacaagagtaagaatcatggaagtggattgataagggcgagacccaacctaat

SEQ ID NO: 3960 - DNA, 349 bp, Lilium asiatic
  Clone ID: LIB3230-015-P1-K1-B6
cggacgcgtgggctggattccaacaagaaagcgatgtctattcagtgcaaggtatgtatgcaaacattcatctgtaccacatcagaggcgaagtgcaaggaacatgctgaagcaaagcatcccaaatcagagctgactcagtgctttccccatcttaaatcatcataagagtgttccaagttaagaagcatctcgctccatcaaatcaacttatgtctatatatttcatctagagttgtgtaattgaaaccttgaatggtgtggaaacaatgctgtgtttgcatatttaaaccgagttttatgctgctttaatatcctagccaacatatgtgctctttaagacatttaa

SEQ ID NO: 3961 - DNA, 421 bp, Lilium asiatic
  Clone ID: LIB3230-015-P1-K1-B8
cccacgcgtccgtgatattggcggctgcgacatacaaaaacaagaaattcgtgaagccgtagaattaccgttaacacatcatgatttgtacaagcagatcggtattgatcccccgagaggtgtgcttctctatggtcctccaggcactggtaaaactatgctcgcaaaggctgttgcaaaccatacaacagctgcttttataagagttgttggctctgagtttgtgcagaagtatctcggcgagggcccgagaatggttagggatgtgtttcgtcttgcgaaagagaatgccccggcaattatcttcgtcgacgaggttgatgccatagctacagctcgttttgatgcacagactggtgctgacagagaagttcagcgtatcctgatggaactactgaatcagatggatggattcgatcag

SEQ ID NO: 3962 - DNA, 420 bp, Lilium asiatic
  Clone ID: LIB3230-015-P1-K1-B9
cccacgcgtccgtgatattggcggctgcgacatacaaaaacaagaaattcgtgaagccgtagaattaccgttaacacatcatgatttgtacaagcagatcggtattgatcccccgagaggtgtgcttctctatggtcctccaggcactggtaaaactatgctcgcaaaggctgttgcaaaccatacaacagctgcttttataagagttgttggctctgagtttgtgcataagtatctcggcgagggcccgagaatggttagggatgtgtttcgtcttgcgaaagagaatgccccggcaattatcttcgacgactaggttgatgccatagctacagcttgttttgatgcacacactggtgctgacagagaagttcagcgtattctgatggaactactgaatcagatggatggattcgatca

SEQ ID NO: 3963 - DNA, 337 bp, Lilium asiatic
  Clone ID: LIB3230-015-P1-K1-C1
cacaaacttgatgcccacacattcactgctgcttagatctgaaattctcggacgctgccccctcccgtcttctctctccccgttgcgattcaatggctacagttgaggttcaatctgccacatatgtcgcgcctacaacagaggtccaacaagacgtgacaaaagatgtacgagccgagaaagcaacgggagaaacatcagtcaagaagccaaaggcggaagtaacaattacaatcgaagcttcaactgaacatgtgaaagaaactgagatcaccaaagaggtagaagctcgtgacctggttgaagttcaaggaaccgaggccctgtaagaggagga

SEQ ID NO: 3964 - DNA, 368 bp, Lilium asiatic
  Clone ID: LIB3230-015-P1-K1-C11
cggacgcgtggggtgcatcctactaccctagcatggacattctgtacgagtgctacgaggatgtagcttgtggaagtgagattcgcagtgttgttttggctggacgccgcttttatgaaaaggaaggcctccctgcattcccaatgggcaaaattgatcagacaagaatgtggaaagttggcgagagagtccgtgcgaaccggcctgaaagagatttggggccgctgcatccatttactgctggtgttttcgtggcgttaatgatggctcagatcgaggtcctaaggaagaagggtcattcctactcggagataatcaacgagagtgtgattgagtcagtggattccctaaacccttttatgcatgct

SEQ ID NO: 3965 - DNA, 397 bp, Lilium asiatic
  Clone ID: LIB3230-015-P1-K1-C12
cggacgcgtggggtgcatcctactaccctagcatggacattctgtacgagtgctacgaggatgtagcttgtggaagtgagattcgcagtgttgttttggctggacgccgcttttatgaaaaggaaggccttcctgcattcccaatgggcaaaattgatcacacaagaatgtggaaagttggcgagagagtccgtgctaaccgtactgaaggagatatggggccgatgcatacatctactgctggtgttttcgtggcgttaatgatggcttagatcgagggcctaaggcagaagggttttttctactcagagataatcaacgttagtgtgcttgagtcattggattccctaaacccttttatgcatgcttgaggggtttcgttcaatggtgacaattg

SEQ ID NO: 3966 - DNA, 337 bp, Lilium asiatic
  Clone ID: LIB3230-015-P1-K1-C2
ttcggtgcaacagcacatacatatttggttgcactggccagaaagttagggctgggagctgaagtggtgcacaatgctgcagtcagggatgcgcttgatctttgaggcttgcaactctaccatatggagaaacaatttgtttaccattctttactgaaacatgtataccggattgtttctaccccaagataggaaatctgctgaagcttggattgcatgctctctgactgttagatatacgggtgaaggagccgtcattggagtcattgtgcagaggaaagaagtgctaggcaccaacataccgcatgacagtacacactgacgtaaaccagttttt

SEQ ID NO: 3967 - DNA, 415 bp, Lilium asiatic
  Clone ID: LIB3230-015-P1-K1-C3
ttcttatggaagtgaaacaggaaagcatatgatgttaattttttcatgatccaaagagaattattggttccttaccctccgaatggataaacgcatcaaactgtagtgattctcatataacttctacccctgtgctactaaagtgggaccccaagactatgaaaggtgcaaattaaatgtactatttgtgttaaagttagcagggcagaaggtgatgcgaagatttaaagtggagatgaattctatcattgttatcaatctcatttcttcttaacaaggcatctccttttgtctattggcacccatcattataaattgtcgtgatctcatggcgaccttttggagtgtcaatgcaacatattttaggcagaagaatgggttgctaaatacttgctcaacatagtcacataaatga

SEQ ID NO: 3968 - DNA, 419 bp, Lilium asiatic
  Clone ID: LIB3230-015-P1-K1-C5
cggacgcgtggggatcagaacaactgaacaggttaatgctgcgctttctacaagccaggccctaaatttggatgcacttgtcattattggaggagtcacttccaacactgatgctgcccagcttgctgagatttttgctgaatcaaaatgtagaacaaaggttgtaggcgttcctgttaccttgaatggggatcttaagaatcagtttgttgagacaaatgttggttttgatacaatatgcaaggttaattcacaactaattagcaatgtctgcactgatgcactttctgctgaaaagtattattactttattcgtttaatgggccgcaaagcatctcatgttgccttggagtgtacactccagtcacacccaaacatggtcattcttgccgaggaggtggctgcatcaaaacttacta

SEQ ID NO: 3969 - DNA, 414 bp, Lilium asiatic
  Clone ID: LIB3230-015-P1-K1-C6
catgttattggatctcgaatgtgatgatctgatactagaaatgttccatcgttttctgacgactgcaagacaagtcaatgatggaagagtgttgaccttcatggagactatgatgacaaagctactaagcgagagtgaagatatccttctatcacgcctcttagattgcataataaaggatattaaggatcatctgccaattccaagcagattgggggagaaagtgattggtaattgtgctgataagctgagaccgtacttgattaaacttgtccgatctaatggcgattcttgttattatggggatatcattgcatctatatgccaagagaattctgataccccagaaccgaataaaccatgtacttctggtgaatgtttgatcttccaggaagagacttgtcacatgcaaag

SEQ ID NO: 3970 - DNA, 347 bp, Lilium asiatic
  Clone ID: LIB3230-015-P1-K1-C7
catgttattggatctcgaatgtgatgatctgatactagaaatgttccatcgttttctgacgactgcaagacaagtcaatgatggaagagtgttgaccttcatggagactatgatgacaaagctactaagcgagagtgaagatatccttctattacgcctctgagattgcataataaaggatattaaggatcatctgccaattccaagcagatagggggagaaagtgattgggaattgtgctgataagctgagtccgtacttgattaaacttgttcgatttaatggcgattcttgttaatatgatgatattattggatctatttgccaagagaattttgattccctta

SEQ ID NO: 3971 - DNA, 420 bp, Lilium asiatic
  Clone ID: LIB3230-015-P1-K1-C8
ttcttatggaagtgaaataagaaaacatatgatgttaattttttcatgatccaaagagaattattggttccttaccctccgaatggataaacgcatcaaactgtagtgattctcatataacttctacccctgtgctactaaagtgggaccccaagactatgaaaggtgcaaattaaatgtactatttgtgttaaagttagcagggcagaaggtgatgcgaagatttaaagtggagatgaattctatcattgttatcaatctcatttcttcttaacaaggcatctccttttgtctattggcacccatcattataaattgtcgtgatctcatggcgacattttggagtgtcaaatgcaacatatttttaggcagaagaattgtgttgctaatatacttgctcaacatagtcacataaatgac

SEQ ID NO: 3972 - DNA, 414 bp, Lilium asiatic
  Clone ID: LIB3230-015-P1-K1-D1
cttcaggttgctggtcataaagatgttcttgaaggggatccttatctgaaacagaggcttcgtctgcgtgatccttacatcacgactctaaatgttcatcaagcttacaccctgaagcagatcagggacccaagctataatgtgaaggtgaggccacatttgtcgaaggagatcatgaattctggtaaagcagctgcagaacttgtgaagctgaacccggggagcgagtatgcccctgggctggaggatacacttatcctgaccatgaagggtgtcgcggctggcatgcacaacaccggttaggttgctttctgcgtttgagcagctgtgaagaatcttacgctctctgcgctttaactacgttccgagttttaagtaatctttctctaagtggacttgttatgttttgcattc

SEQ ID NO: 3973 - DNA, 138 bp, Lilium asiatic
  Clone ID: LIB3230-015-P1-K1-D10
atacaatggagacaccactgacacggataaggatgacgaccactctagggccggtgctaacaaagtgtgcattacagtccctatcaaggatgtcttcaacatttgagatggaagcataccattctgacatcaacgatg

SEQ ID NO: 3974 - DNA, 420 bp, Lilium asiatic
  Clone ID: LIB3230-015-P1-K1-D2
cacaaacttcatccccacacattcactgctgcttagatctgaaattctcggacgcttccccctcccgtcttctctctccccgttgtgattcaatggctacagttgaggttcaatctgccacatctgtcgtgcctacaacagaggtccaacaagaagtgacaaaagatgtacgagccgagaaagcaacggaagaaacatcagtaaagaagccaaaggaggaagtaacaataacaatcgaagctccaactgaacatgtgaaagaaactgagatcaccaaagaggaagaagcaagtgaagtggtagaagttcaaggaaccgaggccctgaaagaggaggaatcaacagaagaggaagcaaatgtagatgaactagttgtagaagcaacacctgagaagatagatgatgttgaagatgttacta

SEQ ID NO: 3975 - DNA, 414 bp, Lilium asiatic
  Clone ID: LIB3230-015-P1-K1-D3
atttgctggtgtttttccagagcacaagtatgaaattgttaaacgcttgcaagcgaggaagcatatctgtgggatgactggagatggtgtcaatgatgcccctgctctaaagaaggctgatattgggattgcagttgcggatgctactgatgcagcacggagcgcttctgacattgtactgacagaacctggtctgagcgtcattatcagtgccgtgttaactagtcgtgcgattttccagaggatgaaaaattatactatctacgccgtttcgattacaatccgtatagtgcttggatttatgttgcttgcactgatatgggaattcgactttccgccatttatggtccttatcattgcgatccttaatgatggtactatcatgactatatcgaaggatagggtgaaaccatc

SEQ ID NO: 3976 - DNA, 419 bp, Lilium asiatic
  Clone ID: LIB3230-015-P1-K1-D4
atttgctggtgtttctacagagcacaagtatgaaattgttaaacgcttgcaagcgaggaagcatatctgtgggatgactggagatggcgtcaatgatgcccctgctctaaagaaggctgatattgggattgcagttgcggttgctactgatgcagcacggagcgcttctgacattgttctgaccgaacctggtctgagcgtcaacatcagtgccgtgttaactagctgtgcgattctccagaggatgaaaaattatactattgtacaccgcgtcgattacaatccgtctagcgttcggaattaatgtgctcgcactggtatgggaatactacttatcgtcatttatggatcttatcattgcgatccttaatgatggtaccttcatgtctacttcttattgtagggtgtaaccattttct

SEQ ID NO: 3977 - DNA, 277 bp, Lilium asiatic
  Clone ID: LIB3230-015-P1-K1-D5
cacgcgtccgagaacgcgttgatatcatatcaactgaacattttaatgctgcgctctatacaaaccagtgtcgaaatttgaatttacttgtcattaccgtaggattcatttccaacactgatactgcccagcttgctgagatcattgctgaatcaaattgttaaacaaaggttgtagtcgtttctgtcacctcgaatggagattctaagaatcactttggtgagacaattgttcgttttgacacattacgcatggttatttcacaactaattaacaa

SEQ ID NO: 3978 - DNA, 102 bp, Lilium asiatic
  Clone ID: LIB3230-015-P1-K1-D6
gaggagggaagaccaacagggaggcggcccagagagcagagaaaaaagcagaaagaaaagggacaacaaaggagggaggcggacgggggaccaggaaggggg

SEQ ID NO: 3979 - DNA, 389 bp, Lilium asiatic
  Clone ID: LIB3230-015-P1-K1-D7
tagttttcgaaacagctgagatggagaccggatccaaggccaagaagggcgccggcggacgcaagggcggtccaaaggctaaatcggtgagtcgttctgtaaaggccggacttcagtttcctgttggcaggattgggcggtacctcaagaagggtcgctatgctcagcgtgttggttcaggagctcctgtctaccttgctgccgtccttgagtatcttgctgctgaggttcttgaattggcgggcaatgcggcgagggacaataagaaaaatcgaattgtgcctcgacatgtgtgtttggcggtgagaaatgacgaggagcttgggaggttgttgggtggtgttaccattgcccatggcggagtcctccccaacatcaacccagtcttg

SEQ ID NO: 3980 - DNA, 416 bp, Lilium asiatic
  Clone ID: LIB3230-015-P1-K1-D8
agacgatccagacacatcatcatctgagagccatggccactactccgcaaagaaaaccgacaaaatctgggcaagaggccattggagacccgccgaggacaccaagctcaaagagttggtatgcctctacggcccacagaactggaacctcattgccgagaagctggggggaagatcagggaaaagctgtaggctgaggtggttcaaccagctggatccaaggataaacaagaaagctttcagtgaggaagaggaggacaagctaatggctgctcacaaactgtatgggaacaaatgggctatgattgctaagctttttccaggaaggaccgacaactcagtgaagaaccactggcatgtgatcatggcaaggaagtatcgtgagcagtcgaatgtttacagaaggatgaagcttg

SEQ ID NO: 3981 - DNA, 292 bp, Lilium asiatic
  Clone ID: LIB3230-015-P1-K1-E1
cttacatgtttgcttcacaaaatgccaatcgagaagctctggtatgggatcgtgcttctcgagaggtgaaagtctataacatgttataccatactgcacgcataaactgcgtggcctgctctcccgataatcgtatggttgacgcgggctcagtggacacatgtgttattcgatatgaggtggccaaggcaggatctacacgcacgactactaaatgcgctcacctaggacgcgcgtatggattggtctacatcgatgagaaccttgtattgacgactggggaagatgcatg

SEQ ID NO: 3982 - DNA, 334 bp, Lilium asiatic
  Clone ID: LIB3230-015-P1-K1-E10
gtgctgtggaggcttcagtgacacggatctggttgatgctcattttaggggcggtgctacgcaagggttcattactgtccatatcaaggaagctctcatgtttgacatgggtgcaaaccatactgatgacaagtctgctatccatatagattccaattacggctgcacggcctattgtaccgctaatgtggctaaggtcatcaatgataaggacgcgatctgtcgagggttttacgaccatcatggacgccatctttgtcattcagaaaactttcaatggagcattcatctgggactggaacggtggcaagtctggaggcttgaacattattgc

SEQ ID NO: 3983 - DNA, 358 bp, Lilium asiatic
  Clone ID: LIB3230-015-P1-K1-E11
agcccatacctcgcactcattatggacatcaccaacaacactagcccaagccccaggttttgggattttggccttggccttggaaaataagttcttcttggttattaaaacctttttcaattttggccaacatttaaccatttttaagcccattttaaccttgcttcttaatttaattgcccccaaattccaaacccttaaaattgtgaggggggggcttattaaaaagagggagaagggcttggagccattgaagggatgatgtacaagattgcccggatgccacccgtggacattgacccatttaccattaagaagcccgagaggagggatggtccgatcaacgaccacccacaaa

SEQ ID NO: 3984 - DNA, 415 bp, Lilium asiatic
  Clone ID: LIB3230-015-P1-K1-E12
gaagtctccgggacctgcagaagtgctatcaagaagagagagcttgaggaaattggattggatgcattcttatttgatgtgcataagagcaagctcaaaagccttccaacgttgcaacacgccactcatgttctcatctctatccctcctgtcataggctctaatgatcctttactctgtttacacaaagacctgcgaagctcattgagtagcggaaatcttcaatgtctatgttatctatcctcaacaagtaggtgtctatggtgattgcggtggtgcttgggttaatgaggattatcatgtcaaccctgagaccgaatctgctaagttgaggttcatagctgaaaaaggatggctggatttggggcgtgaactcggagtgcccactaatatacttagactgggaggaatttat

SEQ ID NO: 3985 - DNA, 416 bp, Lilium asiatic
  Clone ID: LIB3230-015-P1-K1-E2
gcggatctcgaaggggaagaagggaggcaagaagaagactgtcgatcccttctccaagaaggactggtatgacatcaaggccccatcgatcttcaatgtgcggagtgtcgggaagacgcttgtctctcgcacccagggtactaagattgcatctgaaggtctcaaacatcgagtttttgaggtttccttggcggacctccaaaatgatgaggatcaggcatacaggaagatccgactgagagctgaggatgtccaggggaagaatgttcttaccaacttttggggaatgaatttcactactgacaaggtgaggtctttggtccgtaagtggcaaactctcattgaggctcatgtggatgtgaagactacagataactacactctccgcatgttctgtattggattcaccaagagac

SEQ ID NO: 3986 - DNA, 67 bp, Lilium asiatic
  Clone ID: LIB3230-015-P1-K1-E3
ctggcacgtgagggtcaggacaggcgaacagattaacgctgcccttccctcatgcaaggcccgaggt

SEQ ID NO: 3987 - DNA, 370 bp, Lilium asiatic
  Clone ID: LIB3230-015-P1-K1-E4
cggactcgtggggatcaaaacaactggacaggttaatgctgcgctttctacaagcgaggcgctaaatttgtatgcacttgtcattagcggacgagtgacttccaacactgatgctgcccagcttgctgagatagatgctgtaacaaaacgtaaaacaaaggttgtaggcgtgcttgtttccttctatggggagattaaggatcacgttggtgcgacagatgctggctttgatacactccgcatgggtaagccacaactaaggagcagtgtctgcacttatgcactttctgctttaaagatttcttacttcattcgcggaaggggccgcaaagcatttcaagttgacttggagtgcacactctacccacac

SEQ ID NO: 3988 - DNA, 314 bp, Lilium asiatic
  Clone ID: LIB3230-015-P1-K1-E6
cggtcgcgtggggatcagaacaacttaactggataatgctgcgctttctacaagccaggggctaaatttgcttgcacttgtcattaaaggaggagtcactttcaacactgatgctgtccagcttgctgagatctctgctgaatcaaaaagtacaacaaaggctgtgggcgttccttataccgtgaatggggatctcaacattgagtttgttgaggcgaaggttggtcatgacacaatttgcaagggtaatccacaactaattagcaatgtctgtactgatgcactttctgctgaaaagtattataacttcattc

SEQ ID NO: 3989 - DNA, 322 bp, Lilium asiatic
  Clone ID: LIB3230-015-P1-K1-E7
gggatgcgtaggcatcagaacaactgatcaggttaatggtcactttaggagaagccaggccctagatctggatgcactcgaaattattgaaggagtcacttacaacactaatgcatgtcactttgctaagatttgtgctgaattaaaagagtgaacatatgtcgtaggcgttcctgtaacctcgaatggggtatcttaggagacaccttgttgagacagatggtgggggtgatacaatatgcatggttaatgtacaggtacattgcaatgtatgcaatggtgcatttacatgtgagaaggatgatgagaatagtcgaggaat

SEQ ID NO: 3990 - DNA, 113 bp, Lilium asiatic
  Clone ID: LIB3230-015-P1-K1-E8
tagattcgtaagcagcagatcttttgatctgatccaaggtcatcaagggagccggcaggcgcaaggtctgtatacactctaaattattgagtgtgtctctaatggcactactg

SEQ ID NO: 3991 - DNA, 93 bp, Lilium asiatic
  Clone ID: LIB3230-015-P1-K1-E9
gggtttcgtgggcagcagaaaaactgatcaggttcaaggtccccttagggcccggccggcccaaaggttggactcacgctaaaataacggagg

SEQ ID NO: 3992 - DNA, 400 bp, Lilium asiatic
  Clone ID: LIB3230-015-P1-K1-F1
caagctctgcttcaacctcttttttcccagactcggttgaaaatttcagggcatattttgtgaaggccttcttcttggatctgtaccagttcttgtaaaacctacgcctcacctcctcactgagatgctcagcccatactgtggcaagagagcgaaggccacgtggtgtcttaagataaccaaccactccaactataaccatgggtggagtttcaatgattgtcacagcttcacaagtctccttcttgtggagttttgatcctggcttctcaacctcacgaacaatgtgggtcattccagccttgtacccaaggaaggcagtaagatgaggggcttttgatgggtcatccttcggaaatgctttcaccttgccgcggtggcgtgatgcacgcttcctggg

SEQ ID NO: 3993 - DNA, 375 bp, Lilium asiatic
  Clone ID: LIB3230-015-P1-K1-F10
ggggcgcgtggggagcagagcaactgatcaggttaatggttacttttggacaagccatgccctaaatttgattgcactcgttattattgaaggagtcaatttcaacagtgatgctacccacattgctgagatttgtgctgaattaaaaggttcaacaaagtgtctgaggcgtccctgttaccttgaatggggaacttgtgaatcactttatggagacaaatgttggggttgatacaatttgcatggtcaatgtagaggtaattaacaatgtctacactgatgcactttctgctgataggaacgacatactttattagtgtaatgtgtccgattagcatgttatggtggctttggaggatcacttcacttacaccc

SEQ ID NO: 3994 - DNA, 221 bp, Lilium asiatic
  Clone ID: LIB3230-015-P1-K1-F12
agaacggaacgaaaccgggcgaccagcgacggagagaaggaacagcaaaggcataagaagagaggcagaggaaagggagagaagcaaaggaaagaggcaaagagcaagcccaaaagccaacaagaagaacaagcaacaaggcgaacaagccaaacagaaaggcgcaagaaaccgaacaagacacaaagacccggaagcgcaagagagaggaaaaacacaaa

SEQ ID NO: 3995 - DNA, 421 bp, Lilium asiatic
  Clone ID: LIB3230-015-P1-K1-F2
cttccatgtttgcttcagcagatgccaatcgagaagctgtagtatgggatcgtatttctcgagaggtgaaagtaaagaacatgttataccatactgcacgcataaactgcgtggcctggtctcccgataatcgcatggttgccacgggctcactggacacatgtgtgattgtatatgaggtggacaaggcagcatcgacacgcacgactataaaatgtgctcacctaggaggggtgtatggattggtcttcagcgatgagaacagtgtggtgagtgctggggaagatgcatgtgtgcgtgtatggaaactgcagcagtagtactgtttggcaacaaataaacagattgtgtgtgtatgctacagagcttttggttttgcaggttttgagttttggtacctagagctcttgattcggtatgc

SEQ ID NO: 3996 - DNA, 189 bp, Lilium asiatic
  Clone ID: LIB3230-015-P1-K1-F3
cttccatgtttgcttcagcagatgccaattgagaagctgtagtatgggatcgtatttcttgagaggtgaaagctaagaacatgttataccatactgcacgcataaactgcgtgtgcctggtcttctgtatattgcatggttgtcactgtctcactggacacatgtgtgattgtatatgaggtggacaag

SEQ ID NO: 3997 - DNA, 63 bp, Lilium asiatic
  Clone ID: LIB3230-015-P1-K1-F7
cggtcgcgtggggaacagaacaatgttcggttaatgctgactttgtaggagggaggccctaaa

SEQ ID NO: 3998 - DNA, 374 bp, Lilium asiatic
  Clone ID: LIB3230-015-P1-K1-F9
tggttttgtaaacagctgaaatgctgaccgggtccaaggtcaacaagggcgccggcggacgcaagggcgggccaaaggctaaattagtgagtgggtcagttaaggccgtactgcatgtcactgttggcaggattgtgctgacctcaagaagggtacgatatgctgagggtgttggtgcatgagctaatggtgatcttgctgacgaccttgagtatacagatgctggggttgatacaattggcagggaattgctttacagggacaataagataaatggaattgtgcattcacatgtgtgattggcggttagaaaagacgaggagcttgggtggatgcatggtggagttaccattggccaagactgaatttctcac

SEQ ID NO: 3999 - DNA, 336 bp, Lilium asiatic
  Clone ID: LIB3230-015-P1-K1-G1
ctcacaggtttgctttaatacatgccattctagaagctgttgtatgggatcgaatggcttgagaggcgaaagcatacaacctgttataccatactgtacgcataaactgcgtggccggaactcccgctaatcgcatggttgccacaggcttaatcgacacatgtgtgagtgaatatgacgtggtcagggcagcatctacacacacgcctatgaaacgtgctcacctaggatggccgtatggattgctcttcagcgatgctaacaaattattgagtgctggtgaagatgcatgactgcgtgaatggaaactgcagcattagaactgataggcaacaa

SEQ ID NO: 4000 - DNA, 385 bp, Lilium asiatic
  Clone ID: LIB3230-015-P1-K1-G10
gggacgcgtggggatcagaacaactgaacaggttaatgctgcgctttctacaagccaggccctaaatttggatgcacttgttattattggaggagtcacttccaacactgatgcttcccaccttgctgagatctttgctgaatcaaaatgtccaacaaaggctgtaggcgttcctgtttccttgaatggtgatcttaagaatcactttgttgagacaaatgttggggttgatacaatatgcaaggttaattcacatctaatgtagcaatgtctgcactgatgcactttctgctgaaaagaacaattactttattcgtgtaatgggccggaaagcatgttatgtttgcttggtgtgtacacttctattatacccaattcatggtta

SEQ ID NO: 4001 - DNA, 410 bp, Lilium asiatic
  Clone ID: LIB3230-015-P1-K1-G2
atcaaagcatccgtatcatccaggctatgatagatatatctgccaatagtggatggctttcaagtacattgacatgcatgcatcttctacaaatggtcatgcagggattatggtttgaaagagattcatctttatggatgttaccatgtatgaacagcgatcttctaagtcatctcaacagaatgggattctcatctgtgcaagagctattggaacttccacatagggaattacagatgttgctccaacgatttccttcttctgaattatataaggatcttcagcggttaccacgtgttcaagtaaaactggagcttcagatgagagatgcaggagcatcggatcacgttctaaaagtcaaattagagaagaccaattcgcggtcatcatcaagagtgtttgctcctcga

SEQ ID NO: 4002 - DNA, 110 bp, Lilium asiatic
  Clone ID: LIB3230-015-P1-K1-G3
aatgaagtcacggttgtctttattgcagagagtacactgtttatatataagtacaaaacagtgtctcccaaggggtgtgtcccttgggaaagaactgacaagggttgttc

SEQ ID NO: 4003 - DNA, 225 bp, Lilium asiatic
  Clone ID: LIB3230-015-P1-K1-G4
aatgaagtcacggttgaatttattgcagagagtacactgtttatatataagtacaaaacagagttttctaaggggtgtgtcccttggtaaagaactgacaagggttgttctaaaaaaaataaaattaaataaaataattaaattaaaatatagggtggtcgctttagaggatccaagtttacggacgcgaacatgcaacgttaaaatttatttatagtgtatact

SEQ ID NO: 4004 - DNA, 55 bp, Lilium asiatic
  Clone ID: LIB3230-015-P1-K1-G6
tcgctctcgctaagagatcatcccaactatatcgttcatagctgcacttattata

SEQ ID NO: 4005 - DNA, 318 bp, Lilium asiatic
  Clone ID: LIB3230-015-P1-K1-G7
cggacgcgtggggatcagaacaactgatcaggttaatgctgcgctttctacgaggcaggctcctaaatttggatgcacttgtcattattggaggagtcacttccaacactgatgctgcccagcttgctgagatttttgctgtatcaaaacgtttaacaaaggttgtaggcgttcctgttacctcgaatggggatcttaagaatcagtttgttgagacaaatgttggttttgatacactatgcaaggtttattcacaactaattagcaatgtctgctctgatgcactttttgctgtaaagtattaattactttattagt

SEQ ID NO: 4006 - DNA, 415 bp, Lilium asiatic
  Clone ID: LIB3230-015-P1-K1-G8
cccacgcgtccgggaggaggaggccgacgccctacgtgaggtgcaggccaagatcgacgccgtcgatcctgcaagtgcagctggagatcagtctagtagggaggaggctgattctcggtctgtgtatgttggcagtgtggattattcatgcactccagaagaactgcatcagcattttcagccatgtggaacgattaacagggttaccattcccaccaacaaccttggtcagcacaaagggctttgcttatgtggaatttctggaggtagaggctgatcagcatgcactctggctgaatgaatacgagctgcatggccgacaactgaaagtacttgccaaacgtactaatgttcccggaatgaaacaggttcccactaggcgctttaatccatacgcaggttacggatacatgag

SEQ ID NO: 4007 - DNA, 313 bp, Lilium asiatic
  Clone ID: LIB3230-015-P1-K1-G9
cggacgcgtggggatcagaacaactgaacaggttaatgctgcgctttctacgagccaggccctaaatttggctgctcttgttataattgaaggagtcacttccaacactgatgctgcccagcttgctgagatttttgctgaatcaaaatgtaccaacaaaggttgtaggcgttcctgttaccttgaatggggatcttaagaattattttggtgacacatatgttggtgtttgatacaatgtgcatggttaatccacaactaattagcaatgtgtgcactgatgcactttctggtggaaagtattattacttta

SEQ ID NO: 4008 - DNA, 419 bp, Lilium asiatic
  Clone ID: LIB3230-015-P1-K1-H1
gggaggagagggacatgaagccggagacgtttgcgagccttgtctcttctatgctttacgagaaaagatttggtccatacttctgtcaaccagtaattgctggactaggagatgatgatgttccattcatttgtactatggattgtcttggtgccaaggagctcgcaaaagacttcgttgtttctggtacagccggggagtctctttatggtgcttgcgagtctatgtacaaggctgacatggaacctgaggagctatttgagactatatcgcaagcactgctagcttctgtcgatcgcgactgtttaagtggttggggaggccatgttcttcttgtgacaccaactgaagtgcgtgagagcatgttaaaggggaggatggattaaagttctttctgggcgaagttctttatgtgggct

SEQ ID NO: 4009 - DNA, 377 bp, Lilium asiatic
  Clone ID: LIB3230-015-P1-K1-H10
tcgaactgattttcgtatccgaatgcattctttgaaggatcaccttatttaggcgatcgatcaccttcatacagtttttcatgtttcatgtgtatacagcataattccaaggctactggtaccggatgggtcaggatgtgcttaatttcctggaaagtttgatagaaaacaaggcttgttacaaagggtcaagggttgcattttctatcttggacgacacatttgcattgcaaatgcaaaagctgttcggaaatgcttggcaagcgaaggatctggaaccttctagaacggttatggaggttcactcaggcgctttgtaaaggatgcagtgtacatcaatggactaaagttatttcctattgtgttgcgaaaatggg

SEQ ID NO: 4010 - DNA, 424 bp, Lilium asiatic
  Clone ID: LIB3230-015-P1-K1-H2
ggagatcagtccctacaaatactggtctgatgaggtgtagcaagagctgcaggctgagatggactaactatctcaggcccggaatcaagcgcggaaacttcaccccacacgaagaagggatgatcattcatctccagtctctgctaggcaacaggtgggcagctatagcttcttaccttcctcagcgaacagacaatgacatcaagaactactggaacacacacctcaagaagaagatcaagaagtaccaagccgcagtcgacagcttcggcaattctcgatcagcctcatgccatcaagagcttctgtccagaggctatagcagtgagccctccatgcactacccctcactcccgagcttcaaccatagctcctcctccaccacctatgcctccagtaccgagaacatctcaaggctcctcga

SEQ ID NO: 4011 - DNA, 404 bp, Lilium asiatic
  Clone ID: LIB3230-015-P1-K1-H3
attcactttctcaaagtccctttccactctgtagtcccccaccatcatcttacccttcaaaacctatggcaatggatgcctcacctctctgagtgagagagatgaagagcaagagctgcatctatactctataaataacacctcttcaaaccctaagatctccaacacttgaagggagaagcaaaggacagctcctacctccttcctcaaacattccccttcccggctgatccgcaagactggagccagacaagggaaagatgggtaggggtaagatagagatcaagaggatcgagaacaccaccaacaggcaggtcaccttctgcaagcgccgcaatggcctgctcaagaaggcctatgagctctcggtgttgtgtgatgcagaggtcgctcttatcgtcttc

SEQ ID NO: 4012 - DNA, 281 bp, Lilium asiatic
  Clone ID: LIB3230-015-P1-K1-H4
attgaatttatggttgaccatatgccatatggtgcactgtatcattatattacccaacaagagctgtgcaaggggagaccccctttttatatacctgacacgtgtagagcaagagctgcatttatactctataaatgacactcaatataatcgctgggcgctttaaaagattgaagtttaagtacacgtgcacgcaatacctaaaatcttaaatataacgccttcagccagatccactggacggcttgctgcacagggatgaatgaattggggtaagagtt

SEQ ID NO: 4013 - DNA, 130 bp, Lilium asiatic
  Clone ID: LIB3230-015-P1-K1-H5
cttgattttgaggctcaaacaattctgtttgattaggtctgcaattccataccccgggaggggctgatctaaaaatacttcacctatgaataataattatcaatgaagctccaaacattcacatatttaa

SEQ ID NO: 4014 - DNA, 147 bp, Lilium asiatic
  Clone ID: LIB3230-015-P1-K1-H6
ttttctccaaaggatcataccaaactgactgttcagtgcagcacttcaggcaagggaggggctgacattataaacgctggacacaagcgagcgagtgacctctaacgctaccgtcgcttagctagcgagaagcgttgcagtaaccaa

SEQ ID NO: 4015 - DNA, 419 bp, Lilium asiatic
  unsure (1)..(419): unsure at all n locations
  Clone ID: LIB3230-015-P1-K1-H7
cggacgcgtgggcttgagggccttcagtccaacattcagaggctgaagacttacaaggccaagcttgttgtcttcccaagacgatctcagaagtcgaaggctggggattctacacctgaggagctggccagtgccactcaactccagggcacttacatgcccattgtccgggagcaaccggctgttgaagttgtgaaggtgactgaagagatgaaggcattcaaggcctatgccaagctgagggtcgagaggatgaaccagaaacagattggggctaggatgaagaaggctgcagaggctgagaaggaagagaagaagtaacctgttattgttgctttaatttgtggtgatttgtctaagtaaaccctctcaggagtaattntggttctgttggtctttctatcctacttttctattat

SEQ ID NO: 4016 - DNA, 407 bp, Lilium asiatic
  Clone ID: LIB3230-015-P1-K1-H8
atctgatattcgtagccgaatgcaacctttgaaggatcaccttattcaggcgatcaatcacctccatacagtctttcaggttcatgtgtttacagcattatgccgaggctactgggaccggatggggcaggatgtgcttaatttcctggaaagtaggaaagaaaacaagtcttggtacaaaggtgcaagggttgcagtttctatcttggacgacacatttgcatcgcaaatgcagcagctgctcggaaatgctgtgcaagcgaaggatctggaacctcctagatcggttatggaggtccgctcggtgctctgtaaggatgcagcgaacatcaaggactcaagtttctactattgagttgtgaaaatgggtccagctatacgagtatgggcaaagagtctttctacta

SEQ ID NO: 4017 - DNA, 276 bp, Lilium asiatic
  Clone ID: LIB3230-015-P1-K1-H9
atctgatatggggagccgaatgcatcctttgaaggatcacgttattcaggcgagcaagcacctccatacagattctcaggttcatgtgggaacagcaatattccgcggttactgggaccggatggggcaagatgtgcttaattttcctggaaagtacagaaagaaaacaaggtttggtacacaggggcaagggatgcagtttctatcttgggcgacacatttgcattgcaaatgccacaactggtcggaaatgctgaactagcgaaggatttggaa

SEQ ID NO: 4018 - DNA, 327 bp, Lilium asiatic
  Clone ID: LIB3230-016-P1-K1-A10
aacatacttgttcaaaggtgatgcttcacgtaaggagccatctccctgctagacgataagcggggctactacatttgtgtgcactttattaatagtccactctcagaccaaactgtaacaacactcaactatatctccatctattcatctgatcaataagggatcattccaatttcagccatcatgaaaaacaatgatctgtttaaacaaacatctaacgcgactttaaacaaaatcttaacccttacagctgaatgtgcacttttctcgaaaaccatcacaaaacccctattggttaataacactaaacacattcatagtatcact

SEQ ID NO: 4019 - DNA, 413 bp, Lilium asiatic
  Clone ID: LIB3230-016-P1-K1-A12
cggacgcgtgggcgctgccgagcttccttactctatctctccttgttttctttttggattaaatctggagcttacaaatataactctccgtgcaggaatggtggagattgcttacacgcgcgagccagagctatcaagggaggagttgatcatgcatgcacgaaggcggagatggagggctctgatgatgtgaaggtacgaggagcagaggatcaagcagaggagatgcacatgcagacggaccggatcgagaaccaggagatcaagcaccgatgattgatggctctgatgaagtgaagttctgatcagacggcgaagagggaggccgtgcatgaagactctagaagcttgtgtgagaggagatcaccattggttgtgcatgcatggtgctcggagaagaagggatgccaggc

SEQ ID NO: 4020 - DNA, 261 bp, Lilium asiatic
  Clone ID: LIB3230-016-P1-K1-A2
gtgtttgatcggaattgctgctgcaaaggacactgagacggtgagcacaatctcgacccggacacggaacaagagtcctattgtgattgaaactgatggcttgcctgcaaaggaagcttcaacttctggtccggcatatctgaggaagaagtctggttagagacattgtactttgctttgtttgttagcttcaatctttagttttgggttaaatgtctgagactcttggtgatagaaaaattaattgtagacttactttgg

SEQ ID NO: 4021 - DNA, 409 bp, Lilium asiatic
  unsure (1)..(409): unsure at all n locations
  Clone ID: LIB3230-016-P1-K1-A3
cactacggctccaggcgttcctcccagaacactgccaatgccaatgccaaagccaatgggtgcgcaatctcaggcaccgactacacccaggacgccttcttcacaaggaggaccgccttctttcaatcctccaaggcccccaccaccagggtctgcaccacctatgggtaccatacacatcctgtataacacggtctatgacaaatggctacatgcggccagtttctacctncatgccacagccaatggggagcttcactcctggcgttgacatgggtcggccaccgatgcaaggttttcctggacagcaaatgcaagcacaagggcccgcccccaccacaggcaaacatggcgtcgctaacttgcaatgtcatccccgcataattntctgtccttcaaatcaaaacct

SEQ ID NO: 4022 - DNA, 415 bp, Lilium asiatic
  Clone ID: LIB3230-016-P1-K1-A4
ccctcttctccgttttaatgaagagggggttcacccggattatcggatatatttgcagtgccttttcagtggtttggaccctacctccctacatcgagctatatatcctgtactcacttcatatgctacgccagacaagctagctttcccgcgtcactcgcttagccgtgcagctatcctaaccagtggaagtccgatattttttcttgatacctttacaaacctcatcgtatattattcttcaacagctgacccctcgcttccctttcctcctccacaggattgtcttttgagaaacacaatcaacaagctaaagcaggagaggtgcatcacaccgaagctgacctttatccatggagggcatgacgatgccaccgtgttcaacagctatctgattgaagagcaggatgctgat

SEQ ID NO: 4023 - DNA, 357 bp, Lilium asiatic
  Clone ID: LIB3230-016-P1-K1-A5
tcgccctctgctgcgtttgaatgaccagggtgtccacccggatcatcggatatattagcggggccttattattgggtaggaccctacctccgtacatcgagctatatatcctgtactcactaaatatgctacgccagacaagctagcttttccgagtaactcgcttagtcgtacatctatcctaaccagaggaagtccgatcttatttcttgatacatctacaaacctcatcgaatattattcttcaacagctctcccctcgcttacattcccttctccacatgattgtcttttgagaaacacaatcaacaagctaaagcaggataggtgcatcacaccaaagcttacctttatcca

SEQ ID NO: 4024 - DNA, 418 bp, Lilium asiatic
  Clone ID: LIB3230-016-P1-K1-A6
cagtggaatatgcatggatggcttagtaactagacgatggtgcctgtgtatatagatgtgtgatcaatgagtgaaaatgacagtggtaggagcggtaggtggagtcaagacaagaggagcagacttaagtgaagattgaacatgagaggtcaacaaaaggactagcaagaggatcatcacaagatgactctaaaggagaaggggacgactcaggtggagagtgaggtataacattagaggactcaatggaaggttgaagtctgggagatcattgagaggagtgactgacggtttccgaggaccgagtataaaacttatgtcacgaagagtggttggaaagaaattgtgactcattaatatcaatgtggcgagatatacgaatatgacgggtgacaaaatcatagtagcgatatccacg

SEQ ID NO: 4025 - DNA, 428 bp, Lilium asiatic
  Clone ID: LIB3230-016-P1-K1-A7
ctccgcgtaggaagtacaccttggcgctgccgagctttcttactatatatatccttggttgggcttgggattaaatttggagcttacaaatataactctccgtgcaggaatggtggagattgcttacacgcgcgagccagagctatcaagggaggagttgatcatgcatgcacgaaggcggagatggagggctctgatgatgtgaaggtacgaggagcagaggatcaagcagaggatatgcacatgcatacggtccggttcgagaaccaggatatcaagcaccgatgattgatggctctgatgaagtgaagttctgatcagacggcgaagagggaggccgtgcatgaagactctagaagcttgtgtgagaggagatcaccattggttgtgcatgcattgtgctcggagaagaagggatgccatgcaaa

SEQ ID NO: 4026 - DNA, 359 bp, Lilium asiatic
  Clone ID: LIB3230-016-P1-K1-A8
cggacgcgtgggcgctgccgagcttccttactctatctctccttgttttcttttgggattaaatctggaggtgacaaatataactctccgtgcaggaatggtggagattgcttacacgcgcgagccagagctatcaagggaggagttgatcatgcatgcacgaaggcggagatggagggctctgatgatgtgaaggtacgaggagcagaggatcaagcagaggagatgcacatgcagacggaccggatcgagaaccaggagatcaagcaccgatgattgatggctctgattgaagtgaagttctgatcagacggcgaagagggaggccgtgcatgaaaactctagaagcttgtgtgaga

SEQ ID NO: 4027 - DNA, 418 bp, Lilium asiatic
  Clone ID: LIB3230-016-P1-K1-A9
ctccaaagttgtttcgctcgataagaagattggtctgagcgagaaaataagcatggggacttcagttgtgaacgataaagtgaaggacctggaccagaagttccaggtctcggagaagactaaatccgccattgcagcagctgagcagacagtgagcagtgcagggtcagccatcatgaagaacaggtatgtgtttactagtgcgtcgtgggtgactggagccttcaacagagtcgcgaaggctgcaagtgatgttgggtcgaaaaccaaggagaaagtggctgctgagcaagaacacaagacagagctggaggatcactttgctcaggttcgtctcgcagaggctccgaaaggagagcagtcttccaagcctgctcctgcccaaggattaatcctataatttgatatactcgtgtag

SEQ ID NO: 4028 - DNA, 300 bp, Lilium asiatic
  Clone ID: LIB3230-016-P1-K1-B1
ctttccactgcacttatatgctccgaggctcataaaaaaatacaaggttaattgacaccagcgtgaggaaagcaaagttgttttggtttaatcacctagccaatttagctgagttagctgcctgtacccttctacaaacgagctgctgcactacactgataagccccagacttttgtaagcgatctcataaactggggtgtatatgtatttaccccagaaatctttggggctgttcacgatgccttattacaacagaaagacagaactaatttgcgaccaccatctagctttgaagccct

SEQ ID NO: 4029 - DNA, 263 bp, Lilium asiatic
  Clone ID: LIB3230-016-P1-K1-B10
cactcacatatgctctgctgacctaataactaaaccattgcacaggcctatggcggtgtattatcaatgtgtgaaaaacacatccttattaccactaaatgtaaacaatacactaacatcatacctaatcaaacatcgagcatgacatctctacacacttacatatccaaacatcattacaatatatctctaaatcagaatagcaccactaaactaacaaacttttaataacatcctaacacttaaattaacgtcctaatcta

SEQ ID NO: 4030 - DNA, 408 bp, Lilium asiatic
  Clone ID: LIB3230-016-P1-K1-B12
gccggcgacaactccggcatcgtcgccaccgacaccatgaagaacacagtgtatgcaaaggcgaaagagtgctccgaacccttgtcgatggagagttttgcgatccttctcgctaggcatttcactagtctctatccgcaggttacagttgcaatcattaaaatcatcgagaagccttgggagcgtatcgccgtggacgggcaacctcacgtacacgggtttaagcttggatctgagaagcatacaacagaggtaacattgaagaagtgtggggccttgagtattacatctggagttcaagggctagctttgctgaaaacaacacagtcaggttttgaaggatttgtaagggatcgttacacggttctaccagatacaaaagaaaggatgctagcaacagaagtcact

SEQ ID NO: 4031 - DNA, 414 bp, Lilium asiatic
  Clone ID: LIB3230-016-P1-K1-B2
cttcccactgcctgatatgctcgaggctcataaaagatacggtgggatgggaacagtattagtaagcaaggtatctgctgaatcagctagccagtttggtgagttagtggctgacccttctacaaacgagctgctgcactacactgagaagcccgagacttttgtaagcgatctcataaactgtggtgtatatgtatttaccccagaaatctttggggctgttcaggatgccttcgtacaacggaaagacagagctaatttgcgacgtgtatctagctttgaagccctccaatcagcaacaaaggcccttcctacagattatgttaggctggaccaggacattttgtctcctcttgctgggaagaaagagctgtatacctatgagactctcgacttctgggaacagatcaagac

SEQ ID NO: 4032 - DNA, 424 bp, Lilium asiatic
  Clone ID: LIB3230-016-P1-K1-B3
tactttctcggcatcagatgtcgtaagtttctgagttgatctattgcttcatctagtacgccaatctgatccatattgactaaaatatcattataattcatctatcatgccttcaaattatttctccaattaaaacgaatgatatcgaattcatgaacctcaacatattcgtcatcccgagatgaggacgcccctatgaaccattaccacaaacactttgtagactagctctgatatcacttattatgagaacctccaaagcaagcagtagaactcaccgactccacttgacgaaacatagagctctaacatcacttgttgataatcgacgacctatcagagatacaaagtgatggaaaatcccccacacaacttgtcatctaacatatgagtaaataatgaccaatatatacagctacacaca

SEQ ID NO: 4033 - DNA, 405 bp, Lilium asiatic
  Clone ID: LIB3230-016-P1-K1-B4
tactttgtcgccatgagatctcccaagttccttactattgctattgcctaatccagtgcgccaaaatgatcgatctggactaaaccctcaccatcttttatacatgatgcctcgccattattcatacaaccaaaaccaatactatcagattcatgaaccttaacatatccatcctaccccgaagaggagcccctattaaccattaccacatacactcagttgactccctcatacctcactcattatggaaacctcctactgacgcagacaatctcaccgaatcgactctgacgaaacatagaactgtaacatcactcgcagatattcgcctcacccataaaaaatacttagtcttgtacttgcacagacacaccttataatctaacatatcaattaaatctgacc

SEQ ID NO: 4034 - DNA, 416 bp, Lilium asiatic
  Clone ID: LIB3230-016-P1-K1-B6
gggggagagagaaagaaaaataaagtaaagcttactattaggaaatgggaagctgccattatctttttgtatgagacaaaaatgggtcaaatacctaatgttttaatcagaagactttgtgtgggaatggagtagggtaggctgaggttcccgcttatgggaggtcagggggatgttgatatgtaataaagatatgatagaggatcatgaggcactgaagggagcttaggccttgtctagcatccattttgtttcacgggtattcattcttctctgatatcaagaaatagattctccaattctggttctagtatcataggaatttgaaaaatgagaacctcgaatcatgtttggtaaaggcgccttattttcggattctgtaagctgagatataattgtatataataatattaata

SEQ ID NO: 4035 - DNA, 409 bp, Lilium asiatic
  unsure (1)..(409): unsure at all n locations
  Clone ID: LIB3230-016-P1-K1-B7
gccggcgacaactccggcatcgtcgccaccgacaccatgaagaacacaggggggtgggaaggcaaatgagtgctccnaacccttgtcgatggagagttttgcgatccttctcgctaggcatttcactagtctctatccgcaggttacagttgcaatcattaaaatcatcgagaagccttgggagcgtatcgccgtggacgggcaacctcacgtacacgggtttaagcttggatctgagaagcatacaacagaggtaacattgaagaagtgtggggccttgagtattacatctggagttcaagggctagctttgctgaaaacaacacagtcaggttttgaaggatttgtaagggatcgttacacggttctaccagatacaaaggaaaggatgctagcaacagaagtcact

SEQ ID NO: 4036 - DNA, 419 bp, Lilium asiatic
  Clone ID: LIB3230-016-P1-K1-B8
tttagacagagatgatacggccaagcgtatccccgatgtacaaaagcttccagggcaagagggagttaaactttcaaagatacctgttgaactaaagagtggtgaatgggctcttgaaattgtgccttggattggtggtcgaattacatctatgacgcatctaccatcaggcacccagtggcttcacagcagggtcgaaatagatggatatgaagaatacactggcattgagtaccgttcagctggatgttcagaggaatataaagttaccaggagggatcttcaacagtcaggagaggacgaatctctttacttagaaggggacatcggtggtggattagttcttcaacgacgtatttctataccaagagaaaatcccaaggttgcaaatatagattcgagcattatagcacaatccg

SEQ ID NO: 4037 - DNA, 418 bp, Lilium asiatic
  Clone ID: LIB3230-016-P1-K1-B9
cccacgcgtccgctcactgcatcactatgatggaagctgtgaatgacgggaaaggtcttcatgtctctgtggccatgccatctattgaggttggtacagttgggggtgggacccagctggcatctcagtctgcttgcttggacctcctcggtgtgaagggtgcaagcatggagtcgcctggagccaatgcaaggctcctggccactatcatagctggtgccgttttagctggggagctctctctcatgtccgccctcgcggccggtcagcttgtgaggagccacatgaagtataacagatccagcaaagatatgtctaaggctgtctcttgagatgctctctcgtcgccaacgttgataatttaatttgtttgttgtttgttacggtgaactcgaggaagtggtaataatggattatg

SEQ ID NO: 4038 - DNA, 426 bp, Lilium asiatic
  unsure (1)..(426): unsure at all n locations
  Clone ID: LIB3230-016-P1-K1-C1
tncggatctnccttttaagcacgtctngagaaggaagaaagtagagcccccatcaccgatggtgctgcatatagtgctcctgactatgacggttcttcagcacttcttgtcagttcacaagtgcaaagcgagacatcatataccaactctggctggcacgctccacagactacctaaccaatggatgactaactgggttggaacacctatatcacatccagagcctctcttaaagctcaacccaaaagcagttctagatccgggcccatttcaaaaaaaatggagccaactggcaacatctctatcacaggaatgctctctaagccctcaaggtgttgtagctttggcgacacctcagaccctactccgccacatgcaaggccactccatccagtgcattgcctcaggaggtcaagcaccgaactt

SEQ ID NO: 4039 - DNA, 384 bp, Lilium asiatic
  Clone ID: LIB3230-016-P1-K1-C10
attcatcaaaacacactaatgggggggaaatactcatcaaaacacacaaaaatgaaagagctgcagatgtatcttatgaggcttctacatggtcccatgatcataatataacattccaaatacccaaaaggagaataaaagcactaatccagcagatactaccaacttgagctgagttacttcttggttttcttaggagccacggcagcctgaggtgcaggtgcaggtgctgctactggtgcaggtactcgttcaactgggccctgggcgagtcgctcctccctccgtgcatgcttcctctccctactcgccttgctcttagcacgcttagcctcaaactggtcatgcaaagtcttctccctcgccttttcagccttcgacttg

SEQ ID NO: 4040 - DNA, 284 bp, Lilium asiatic
  unsure (1)..(284): unsure at all n locations
  Clone ID: LIB3230-016-P1-K1-C11
cagtttaatatgcttttctgncttttttactatacattagaacacgcttataggggtggtgtatatcaatgtgtgcaaacaacaacgatagaaccgctagttgaagttaagacactaataccttactcaattatagacagatcacgttaggtcaaccaaaatactaattaaacgatctttaccagccgactctacctgagaagggttcgtttctacttgtacgttttatataacatccaatcactcaatggagggtcacagtctattatattcattgagagcac

SEQ ID NO: 4041 - DNA, 352 bp, Lilium asiatic
  unsure (1)..(352): unsure at all n locations
  Clone ID: LIB3230-016-P1-K1-C3
cactttctcggcatcagatctcgnaggtcataaagtatactgattgcttcatccgagtagaccaatctaatctatcatctctaaaatctcatcataattcatctatcatgccttcaaattataaatacaatcaaaaccaatgcactcatattcactaaccttaacatatccatcatacaaactaagatgatcccttattaaccattaccacaaacactttctatactagctcttatatactaaatataaaaacctccaaatcaagcagtataactaacttactccacttgactaaacatacaactgtaacatcacctgattattaatagactacacatcaaaaatacaaatt

SEQ ID NO: 4042 - DNA, 413 bp, Lilium asiatic
  Clone ID: LIB3230-016-P1-K1-C4
gtcatgcagtgtcttggagccatctgtggcgccggtgtcgtgaagggttatcaggaggcgctctacgaggctaacggtggaggtgctaatgtcgttaaccatgggtataccaagggtgacgggctgggtgctgagattatcggcacctttgtgctggtctacaccgtcttctctgctactgatgccaagaggagtgcgagggattctcatgtcccgattctggctccgttgccgattgggtttgcggtttttctggtgcatttggcgaccatccccatcactgggactggtatcaatcctgctaggagtctaggggcggttatcatctacaacaagaagcatgcttgggatgatcattggatcttctgggttggggctttcactggagctgcacttgctgcgttgtatcacgt

SEQ ID NO: 4043 - DNA, 420 bp, Lilium asiatic
  Clone ID: LIB3230-016-P1-K1-D1
ctcaggttttcaacatttgttgtgggagccttacaccagtgtgctctccacccaattctcttgtggaggcacactgatgttgctgttctccttgacaatgaagcaatttatgacatttgtaggcgctcccttgatattgagcgccccacctacaccaacctaaaccgtctggtttcacaggtgatttcgtctctgacggcatccctgaggtttgatggtgccctgaatgttgatgtcacagagttccagaccaatcttgtcccctacccaaggattcacttcatgctttcatcctatgcaccggttatatctgctgaaaaggcttaccatgagcaactttctgttgctgagatcacaaacactgcttttgagccttcttcaatgatggcaaaatgtgacccccgccatggcaagtacatg

SEQ ID NO: 4044 - DNA, 413 bp, Lilium asiatic
  Clone ID: LIB3230-016-P1-K1-D12
agaacttcctattcataatgcagccaaactgcaacctcgtcctctaccatgattgcgccgcagtgtggtcgaccaagaccggcggccaagattacggttgttacgccacattgcacaacggcggcaacctggtcgtctacagccccaacgccgtacccctgtggcagagcggcaacggaacctcaggaggggaatatgttattcttcttcaaaagaacggagatgccgtcatcttcggcactgctaaatggtgggtggtatggcctacattgaacctagtcgcctctaacaccacagcaccgccgttagaaggtaatgaagaagcaaccctattatcagtaatgtctgaacctactaatgtaccggacaccttggaaagcctagaaactagtgaatctctcccttgggaacat

SEQ ID NO: 4045 - DNA, 419 bp, Lilium asiatic
  Clone ID: LIB3230-016-P1-K1-D2
cggacgcgtgggcttggtgctgtatatagatacaagaaactgaaggaaatgagcgtgggggagagaaaaaatgtgtcaccacggactatcatgcttggaggaaaagctttttcgacatataccaatgctaaaaaaatagttaaactggtgaatgatgttggtgctgtggtcaacaatgattctgaaatcaacagctatctgaaggttgtctttgtaccaaactacaatgtatctgtagctgaaaaactcattcccggaagtgaactctctcagcacattagcacagcaggcatggaggctagtgggaccagcaacatgaagttttcactaaatggttgtctgataattggaactttggatggcgcgaatgtagaaatcagagaagagattggggaggagaattttttccttttcggtgc

SEQ ID NO: 4046 - DNA, 418 bp, Lilium asiatic
  Clone ID: LIB3230-016-P1-K1-D3
ctttttgacgttccgatcgtccccgtcggatccctactgaatttctgggagccctggagctcaattttgggctgatactcgaagcacatgatctggagccatgaggaagaagttggatacccgatttcccgcttctcgaataaaaaagataatgcaagcagatgaagatgtgggaaagattgcacttgctgttcctgttttagtctctaaagcattggagttgtttctgcaagacctttgtgacagaacctatgatgtcactcttcagagaggtgtaaaaaccatgagctctttgcatttaaagcagtgtgtgcatagttttaatgtctttgatttcctgcgggatatagtgagcaaagttccggatatgggtactacagatgttggcgctgaagatagaacccttaagaaaaggaaa

SEQ ID NO: 4047 - DNA, 399 bp, Lilium asiatic
  Clone ID: LIB3230-016-P1-K1-D4
gtttttaggcatccacatgacggaatgcttcgttttggtgcagctgggacaactgttgatataaggcaataccgccgattggatgatggcacattaaatgtggttgctcggggtcaacaaagattccgtgtgagacgccgctggatagatgtggaaggagcaccatgtgcagaagtccaaattgttcaggaagatacccctttaagaattccgagggctgcttttggtcaattagctcctgttattaatctcaagaaacatgctttagcacgtggagtgcccttgtcttttcattcccttaaacggcatggatccatggatttaggaaatgattcagaatgtatgtctggtgcaagcgtatccagtgatgattcagaattggacatgacaatgtgcttg

SEQ ID NO: 4048 - DNA, 417 bp, Lilium asiatic
  Clone ID: LIB3230-016-P1-K1-D6
gagtccagatgcctttagtgtcatcgagacgatgcaattctcaagtattgcagatgctggcagtccccatgtgtttttcctaatttctttcaagaattcttcggagctcaggatctaaatccctccatgaactagttccttttgaggcgcatgagttaccacttcaagaagatgagacagttatgcaccacatgactaatttgtgtggggtaagggatttatcggatgagagtaacaaccaaagtgagacctatagcaatattatgcacttcgaagctagcaatagaagcctgcttgcgggttcttgtgtttcgagcgcagttttagaagacttttgcgtggtgaagagttctgatttttgtatcccttctcaagatctggttggtagctttacttcaaatcgggatatacattctc

SEQ ID NO: 4049 - DNA, 405 bp, Lilium asiatic
  Clone ID: LIB3230-016-P1-K1-D7
aactccacctacctataatccaaccaaaccacaaccaatcccaataccaggacggcatcacaatattaatggttaacaccaaaccacaaaacaactatccataactcacaatctacatccttcaaaacaccaacacccacagacccaacaccttaaccacttaacaaaacccaaacacaacctcaccacacaactattacatatttctacaaacaatcacttaccacatcctctccacaactattaaacccatcccaaaattacccacacataacctaaccacctataccaccacacacacaactgtaaaaccaacacaagattacaccccaaccacaagcaaaacagatcctactactggcccccacaccacgcacaaccttaaacactaatcaaacctaacca

SEQ ID NO: 4050 - DNA, 395 bp, Lilium asiatic
  Clone ID: LIB3230-016-P1-K1-D8
aaaacttcctacctataatacacacaaactccaaccactacctacaccaggagtgcaccacaatatttgctgggtaaaaccaaaccacaaaacaacaatctataaaccacatactacaacaaccaaaacctcaacaactacaaccccaacgccttacccatttatcataacaacaacacaacctcatgagacaaatataacatatttctccaaacaaacacatatcccctcatcttctcaactactaaataccgccacaaatgacctacacctaacctacacgactataacaccacaccaacacctttaaaatcaaattaagaatcaaccctatcatcactaattactcaacctactaatggacactacaccctccaaagcctaaaaactaataa

SEQ ID NO: 4051 - DNA, 286 bp, Lilium asiatic
  unsure (1)..(286): unsure at all n locations
  Clone ID: LIB3230-016-P1-K1-D9
acatccaaaaactacctaccaacaatccacacaaaccacaaccaaatccacccccaggacggcaccacacaaaatactggcaaaaccaacaaacaaaacaactatcaatacaccacaacccacaacaaccccaacctcaacaaaacaaccccaactccgcacccacttatcaaaacaaaaacaaaacctcaagagcaaaatataacatacttctacaaacaaacccaaaccccaccaaatacacaaccaaaaaataccgncacacatcacctacatataaccaaca

SEQ ID NO: 4052 - DNA, 412 bp, Lilium asiatic
  Clone ID: LIB3230-016-P1-K1-E11
gagctgaggaactgttcgtcttgtctgttctttgagtgcaggaagcagaaagaggtttacctgtggatggcaaaatcgccgaatgggccgtccgtgaaattcttggtcaatgcgatacacactatggaggaaatgaagcttactgggaatcatctgaaagggtcgcggcctattataacattttcatcgaactttgacagccaaccgtactggaagcttttaaaggagataatactgcagatatttgaaacaccaaaggatcacagaaaagctaaaccattccacgatcatgtctttgtcttttccatagttgatgatcacatttggtttcggaattaccagatttctgttcctcacaatgaaattgataaagtagaccgaggaggcctagaaaaaatgacccttatagagg

SEQ ID NO: 4053 - DNA, 409 bp, Lilium asiatic
  unsure (1)..(409): unsure at all n locations
  Clone ID: LIB3230-016-P1-K1-E12
gagctgaggaactgttcgtcttgtctgttctttgagtgcaggaagcanaaggatgtttacctgtggatgggtgaatcnccgaatgggccgtccgtgaaattcttggtcaatgcgatacacactatggaggaaatgaagcttactgggaatcatctgaaagggtcgcggcctattataacattttcatcgaactttgacagccaaccgtactggaagcttttaaaggagataatactgcagatatttgaaacaccaaaggatcacagaaaagctaaaccattccacgatcatgtctttgtcttttccatagttgatgatcacatttggtttcggaattaccagatttctgttcctcacaatgaaattgataaagtagaccgaggaggcctagaaaaaatgacccttatag

SEQ ID NO: 4054 - DNA, 413 bp, Lilium asiatic
  Clone ID: LIB3230-016-P1-K1-E3
gctattggcacacacgagtgctacgttctctcaacacaaaatatcctctcggccatgctaccgctacattaaactctgttgacactacattgctagtcctacatgtacattaacacgcctcctcaaactcaaggtgggtcgaacaacatgagtttgaccactcacgatgccaaacacacgagagatgtctgacctggtgatgcagaggtagataagttggttgacgaggtgtccgaagcgagtaggatcagcaagaggctcaccatcagtcggtcttagcttcacaatctgttgtaggggagtacttatggtcttctcatcagatatgttaacccggtccaaaacattaaagatgtatttttgatgagagcagtataccccgtggatcttgtgagaccgaggaagtagcaaag

SEQ ID NO: 4055 - DNA, 216 bp, Lilium asiatic
  Clone ID: LIB3230-016-P1-K1-E4
attacataacacgcctcctcaaactcaaatggtcgaacacattatttaccactagattccaaacacacataactctacctgtgatcagagtaaataaatttttactagtttacaactagtaacatcacatagctcaccatcatcgatcttaactaacaactctgtagatattactatgtcttctatcataatgtaacccttccaaaacataaagat

SEQ ID NO: 4056 - DNA, 412 bp, Lilium asiatic
  Clone ID: LIB3230-016-P1-K1-E5
atctgtttcactctcccgctggtttcgtcgaactgtcccttacttactttggttgatcggccggacgtcatggctattccgactccctggaaatctaagattccagaggcggataatggcccagacccgtgtgagcttgacaagattgagtttcccgatttgaatgtcgtgaaggagaatgagatgatggtctcagagtattttgggattccttgtaccgatttgaagtcacttaacaccaagagtttggatgcttcggagaatggcaactgctccgatgatgatgcggggatccgtgtggtggagagttttgcgtcctcagagaatagtctagattctgctttaaagaaagatacacctcagagtagtgtttcaacgaatgggtcgcctccttcgccttctgaaacctctc

SEQ ID NO: 4057 - DNA, 413 bp, Lilium asiatic
  Clone ID: LIB3230-016-P1-K1-E6
gttttgcctactaccatctaaagccaaatgatccacgtcttgtttgggatcgtcgaccggtgactgttgcattcacatcaatcatggcaatcttcatcattgaaagggttgatgaggagactggaacttcatctattttgcctcttattattgctggcatcttaagcattttatattggagattctttgatgatttacgcccatatgctgttgtccagtttgttccttgcattgttatgcctttgatggccatacttgtgcctgcaatgtatacgcattcctcttactggttatgggcagcaggattttatctcttagccaaagtggaagaagctgaggataaattgatctacaaatggactcatcatgtcgtcagcgggcatacccttaagcatttatgtgctgcaatggtt

SEQ ID NO: 4058 - DNA, 413 bp, Lilium asiatic
  Clone ID: LIB3230-016-P1-K1-E7
ttttcatatttctctcgaaatggctccttcagtaatagcgagaaccgaaatttgggtgctactcttatctcgaactacaagaactatataacggatttgtatgttcttggagctaggaaattcgggatagtagatatccctcccattgggtgctgcccatacccaagaagtctgaaccctacaggttcttgcagcgacggcttgaatggacttgctttacagttcaacgaggcctgtaaagggcttctgcaaaaccttagatcgacgctcccagagatgaaatactctatagggagttcctatgctgttgtgcagaacataattcgcaaccctactgcgctaggttataaagagattaagactgcgtgctgtggatctggaaagttcaacggcgagtctggttgcaccccgaa

SEQ ID NO: 4059 - DNA, 326 bp, Lilium asiatic
  Clone ID: LIB3230-016-P1-K1-E8
gactccaactgcctttaatgtctttgttactatgcaattgtcaacgatagggggggctcgccattcttatggatcccctaaaacctttcaacaattatctataactcagcaactaaatacttccatgaactaaaaccttttgagccacatgagttaccacttaacaaacatgatacacctatacaccacatgactaataatgatttctacaagcaatttatcaggctgatagtaacatcaaaaatgagacctatatcaatattatgcacgtccaacctaacaatagaagcctggttgacacacacctgtgattccagcgcaagatt

SEQ ID NO: 4060 - DNA, 386 bp, Lilium asiatic
  Clone ID: LIB3230-016-P1-K1-F1
acgaatacgcttggggccatatttctggctaggaattacagtccaagacaattgctctgtgggtccttatgaacactcattctcaaaatctttcttgtgaaatgtgatgatgatacatatataacacatgtagtactcttgcatcctatgaaaggaaattcaacactttcagcgaaaccaacaatcaattcaccaaaaccaacatttaatcaatcagtatctgattctgagaaccctattgaatgtactccatccaatgaagatcaatcagagatagacagtgcaaaaacataaacttaggtgtccagtgaggaaagtctaaaaagtgttctaaactttttgtaaggatagagttcctggatttaaagttaaagtattagaacgtc

SEQ ID NO: 4061 - DNA, 159 bp, Lilium asiatic
  Clone ID: LIB3230-016-P1-K1-F10
tcattcgtacttttacaccatataatctccaaactatacctaccagtgcatatgacttggtgggtgctctataatagtgggtaaaaccaatccacctaaccatttatctataaataatcaacttattaattcatttaatcaacacaaataatctccttt

SEQ ID NO: 4062 - DNA, 413 bp, Lilium asiatic
  Clone ID: LIB3230-016-P1-K1-F11
agttgagggggttttgctgctcaagaggacttggcgcactatctggatgtgaaggaagatgataatggtaggattcttgggtggtcctcgagagtttccatcatcaaaggcattgcgaaaggcattgaatacttgcacaacaacaaaccaaacaagcccccattgctccaccaaaccatatctgccgagaagataatgattgacgaacacttcaatcctctactctccgactccggcatgtacaagctcctaactgacgatgtggtcttctcctccctcaaagccagtgcggccatgggctacctagcgcctgagtacaccacagtcggacggttcactgagaagagtgatatctacgccttcggcattcttgtattccagatcctcacaggcaaaggaagcacaagtaactt

SEQ ID NO: 4063 - DNA, 411 bp, Lilium asiatic
  Clone ID: LIB3230-016-P1-K1-F12
agttgagggggttttgctgctcaagaggacttggcgcactatctggatgtgaaggaagatgataatggttggattcttgggtggtcctcgagagtttccatcatcaaaggcattgcgaaaggcattgaatacttgcacaacaacaaaccaaacaagcccccattgctccaccaaaccatatctgccgagaagataatgattgacgaacacttcaatcctctactctccgactccggcatgtacaagctcctaactgacgatgtggtcttctcctccctcaaagccagtgcggccatgggctacctagcgcctgagtacaccacagtcggacggttcactgagaagagtgatatctacgccttcggcattcttgtattccagatcctcacaggcaaaggaagcacaagtaac

SEQ ID NO: 4064 - DNA, 205 bp, Lilium asiatic
  Clone ID: LIB3230-016-P1-K1-F2
gaaaggaaattcaacactttcaagggaaccaacaatcaattcaccaaaaccaacatttgatcaatcagtatctgagtctgagaaccctctttgaggtactccatccaatgaagatgaaacagagaaagcagtgaaaaacaaaactaggtgtcagtgaggaggtctaaagtgtctaacttctgaggagagagtctgattaagtaag

SEQ ID NO: 4065 - DNA, 420 bp, Lilium asiatic
  Clone ID: LIB3230-016-P1-K1-F3
aaaatatgtgggctttcagaactttcaatcaagatgttaatatgtgatctttgggaaggagcatttcatgtatcttgttgcaagtctaaagtaaaggtattgccgcttcataaatggcattgtccaccttgttcaaaaaagaaacagaagactttatggctgaagcatactggaaaatcttttgagaacataaagggtaggaaaagaacatggcatgtggaaagtcatgtatcgctaatgttgaaggatgttctgccatttgcatccaaggttcgcatcgggaaagaatttcaagcagagatcccggactggtgtagcccaatacatggaaagtgcagggatactttaattgtgtaatcttcagatggctctcatctgtgctgatcctgatatgctgctgctcgtatagtgttcatcctg

SEQ ID NO: 4066 - DNA, 322 bp, Lilium asiatic
  Clone ID: LIB3230-016-P1-K1-F4
attattgacacactcaaataccacgcaagctacaacataatatgctatcttcccggcgggttgatacattaaacttttgcgccactccaatgttatggcttcatctacatatacactccttcccaaactcactctaatacaaacacaaaaaactttaccacttacgaatacttacaaaccattgatcttcctcctggttatccaaagatcaattcattggaatactaatttctcgaacctagttacataacctctggcatcaccatccaaagatctcatcttaacaacatctcattcggttttacttaacttcttcataaca

SEQ ID NO: 4067 - DNA, 175 bp, Lilium asiatic
  unsure (1)..(175): unsure at all n locations
  Clone ID: LIB3230-016-P1-K1-F6
atctttcacagtcttaaatccctcnactactccaatctcctgattacttaacacaagagactatactaatctatcggctctatcccttttctctttaaccatcattataccattcacttctcccatccatctaacattatacactcctattttctaatctacaacattttttctt

SEQ ID NO: 4068 - DNA, 414 bp, Lilium asiatic
  unsure (1)..(414): unsure at all n locations
  Clone ID: LIB3230-016-P1-K1-F7
tacttactctgcattacatctcaatatttcttagctatctataatgattgggggagtacactatactgatggatctnttcaaacatttaatcattttacattaatcatgccattaaataattcctacaatctaaacaaatgatctcatattccctaaccttaacatattactattctattgatgacgagaccactattaaccattactacatacactttttagactaactctcacatcacttattacaacaacctcctaaatacgcctaccatctcacttaatacaccttacgaaacatacatctataacatcaatacatgatattatgcatactatcaaacatacatagtattttcatttcccccacacaactattcacataacatatgactaaataatgtccaatttataca

SEQ ID NO: 4069 - DNA, 414 bp, Lilium asiatic
  unsure (1)..(414): unsure at all n locations
  Clone ID: LIB3230-016-P1-K1-F8
gtcagtggtgctgcagcagctgctgcaggaagggtcagtcctctttctggggctgtggcttcagtcttccgcgactgcaagggatctagccgttctanccnattcccagataccagctctttgtggacaaaaacctacttgcttgttttttctccatctggctgtatcatacagtatgtgttacgtcactcaactagtgaggagtctggccttggtctatcagggttaggtactcttcctaatggatcattttatgagagtgattcgaggttagttgttgaggcacttcagaaatgggatgtttgtaataattnnaacagaagagatccaggtgacaatatcgatgtatatggcaaacatgagagtggagaaagtgccaagattttctcaaaagggacaaaaagaggtaccagt

SEQ ID NO: 4070 - DNA, 407 bp, Lilium asiatic
  Clone ID: LIB3230-016-P1-K1-G1
aaaaaagcagaatgataaccgggattcgcaatgctattgatctcatgcccaggggggagaccgtgagaattgaggatatgttcctcttcgaccatcctttctttcatggaggccccgatctacttgacaggcacagagacatgcgactcgatgtcgatcgtatgtcttatgaggaactattggcactggaagaacggattgggaatgtaagcactggcttgaacgaggaaaccatcaacaagtgccttaagcagatgcctcatgtatgtattacagatgaggcattagaagaagtcgaaccgtgctgtatatgtcaggaggagtatgtcgagggtgatgggctcgagaaactggattgcggccatgactttcatgcagtgtgcatcaagcaatggctactgcagaag

SEQ ID NO: 4071 - DNA, 379 bp, Lilium asiatic
  Clone ID: LIB3230-016-P1-K1-G10
ctttatcagatatccaccttaacaatctgcagtcgggtttgtaccatgctgggttgcatcgtctcgacccacctccgcctccgagaatgactactggcctcatctacggcaatcaagctgtgcacgaaaacgtctcgtgcctactaaccatcggcaatccttctcaaagtacaaagaaatcatgtgacacgaagcctcagtttgtgctttttggacagactatactaaccgaagagcaaatctcacagagcagttctggcgacacagtctctcctagggttacaggaaacagttcggacgggaatcctgagaaggcagcaaatttttccgacgggtctggctctgcagttcaccagaacggtgttgtaaaaaattcttc

SEQ ID NO: 4072 - DNA, 415 bp, Lilium asiatic
  Clone ID: LIB3230-016-P1-K1-G11
gcagaagaccgaggcagaggaagttgtggtggaggatgaggaggaggaagatgaggacgatgacgatgatgacaaggatgatgatgaactcgatggggatgccagtggcaagtcaaagcaaagcaggagtgagaagaagagccgcaaggccatgctgaagcttggcatgaagcccatcactggtgtcagccgcgtcactgtaaagaaaagcaagaatatactctttgtcatctccaaaccagatgtgttcaagagcccgaattccgacacgtatgtcatattcggcgaggctaagatcgaggacctcagctcccagctgcagacccaggcagcagagcagttcaaggctcctgacttgagccagatgatctcgaatccagagacgtctggcccgggacaggaggacaatgatgag

SEQ ID NO: 4073 - DNA, 375 bp, Lilium asiatic
  Clone ID: LIB3230-016-P1-K1-G12
gcataagaccgattcacagtaagttgttgttgaggatgatgaggaggaaggtgggggctattacgatgatggctaggatgatgatgaactcgattgggatgcctgaggcaagtcaaagcaaagcatgaattattagaagagccactaaggcacatgctgatgcttgtcatgataccaatcactgatgtcagccgattcattgtaaagaaaatcttgaatatactattcttcatctacaaaccatatatgttcaaaagcccgaattccgacacgtatttcatattagacgaggctgatatggaggacctaatgtcacagctgaagacctattcagcatagcatgttaagggttctaacttgagccagttgatctaa

SEQ ID NO: 4074 - DNA, 73 bp, Lilium asiatic
  Clone ID: LIB3230-016-P1-K1-G3
aatattccttctcccatacccctcgcttttaatctcataatatgataaccgccctgggggccaacaaaaacac

SEQ ID NO: 4075 - DNA, 352 bp, Lilium asiatic
  unsure (1)..(352): unsure at all n locations
  Clone ID: LIB3230-016-P1-K1-G4
attattgacacacacaattcccncgaccaataccacataatttcctatcagccctgcggggcatacataaaactgtggccacactccattactcttcctacatgaacattaacaccccttcccaatctcaacagttctctaacaaaatgattctgaccacttactatgtctaacacacaatatatctttcaccttgttattcagtaataaaaacatccaacctactatgtttccctaccgcaatacaaaaactactaaccttaccattcgtctacctcatcatcacaacatgtatttaggtagaactcaccgtcctcttaaaaaatatattaaccctttccaaaacaataaa

SEQ ID NO: 4076 - DNA, 242 bp, Lilium asiatic
  Clone ID: LIB3230-016-P1-K1-G5
aatgactactgcactaatatacagcaatcaacctgagcacgaaaacgtctcgtgcctactaaccatcggcaatccttctcaaagtacaaagaaatcatgtgacacgaagcctcaatttgtgctttttggacagactatactaaccgaagagcaaatctcacagagcagttctggcgacacattctctcctagggttacaggaaacagttcggacaggaatcctgagaaggcatcaaattttt

SEQ ID NO: 4077 - DNA, 416 bp, Lilium asiatic
  Clone ID: LIB3230-016-P1-K1-G8
cattcccccagcagccgagagaggagagagcagcaatggtgcagcgcctgacctggcggaagcgccacagctatgccaccaagtcgaatcagacaagggtcgtcaagaccccaggtgggaagctggtgtaccagaacactaacaagagggctagcggaccgaagtgtccggtgactgggaagaggattcaggggattcctcacctgaggcctactcagtacaagaggtctaggttggctaggaatcggaggactgtgaatcgtgcttatggaggggtgctctctggcagtgctgtgagggaaaggattattcgtgcttttcttctcgaggagcagaagattgtgaagaaagtcttgaagatccagaagactaaagagaagaccaccaaaagttaagtatgagagttgaagctgaat

SEQ ID NO: 4078 - DNA, 360 bp, Lilium asiatic
  Clone ID: LIB3230-016-P1-K1-G9
gacttgcacagcatccgagccagtagggagcccgactggtgcaacgcctgaccgagggcactctactgatctatcccaccatagtcaataagcactagggccatgaatatgccacgggttaatgtctgggaccagaacacttacaatcctattagctgacctacacgtactgatattgtacagaggattaaaggtgttcaacactttctaaatacactgtacatgactcctacgtcgattaggaatagggggactctgtagcgtacgtagaccatctagatcactgacactgctataaatacaactattattctagctgctgatatcatgcaccacaagaaggatgctagggtctttaat

SEQ ID NO: 4079 - DNA, 94 bp, Lilium asiatic
  Clone ID: LIB3230-016-P1-K1-H1
catattccttcacgcacatctcaatatctaaaaaacataatctcataaaccaactgttggccataaaaaacactgttatttcactcttatacaa

SEQ ID NO: 4080 - DNA, 183 bp, Lilium asiatic
  unsure (1)..(183): unsure at all n locations
  Clone ID: LIB3230-016-P1-K1-H2
tcgttttttcttttnttcttttttttccccgaaacaaatccaaatttagagttttgaacatttgaaatacatacaaacattccgtgttattaaaattcgaaaaccattttcccacacatagaaacaggaaatcatggtcagtatacagcgatgaacggcttaagaacagaccctatccagagt

SEQ ID NO: 4081 - DNA, 293 bp, Lilium asiatic
  Clone ID: LIB3230-016-P1-K1-H3
agccttccgtattccctttaaatctaaactaaccaccattgtcggcccgtgccaaggccggaagggggctcgaaaagggcggggcgaaccgtcaccggaaggtcctccgcgccaccatccagggcttaaccaagccggccatccgccgcctcgcccgccgggggggtttgaaccgcatcaccggcctaatttttgaggagacccgcggggtgctgaaaatctttttggagaacgtaatccgtgacgccgtaacctacaccgagcacgcccgccggaagacggtcacggccatg

SEQ ID NO: 4082 - DNA, 127 bp, Lilium asiatic
  Clone ID: LIB3230-016-P1-K1-H4
gttattgtcgcactcgatgctctcgaccaatacaacataatattctatgtgcccagctgggggaacattaaactgtgaccacactccattgatcttggtacatgagcattaacacgctttcccaatc

SEQ ID NO: 4083 - DNA, 250 bp, Lilium asiatic
  unsure (1)..(250): unsure at all n locations
  Clone ID: LIB3230-016-P1-K1-H5
atatctctggtataacaaccgaattgaatannattaaacctaaatctagncgnngtggttatgggtttannggggttggacccctttctgacctctctgtgcctcnncttttgttcaaccatcannaggtcgtctaccgatgacccccaaatccagcgatnngttagggtttcggggttnggccgagagccaatgtggatggggcgtgttagggtggaagggggccgagagaaatgccggatggcaatgt

SEQ ID NO: 4084 - DNA, 393 bp, Lilium asiatic
  Clone ID: LIB3230-016-P1-K1-H6
cacatattaatcgacacactctgataccacatcaaatgcgtgttgcactggagctaattttgttctgtgctcgaaacacaacattcttgaccatgaggaaccatttggtaccctaactggcgtttacaataaaacaagataatccaagctaaagaatatgtgctgacgattgcacttggtgttgctgtattaatctctaaagcagcggagttacttcttgtagaactttgtaagaaaaactatcgtggcactagacagagagactctaaaaccatgagctttttacattcaaagcagagtttacatagttttaatgtctacgatatgctgcttgatatagagcgcaatgtcacggaaaaggttactacataagatggtgctgaacttagaaca

SEQ ID NO: 4085 - DNA, 373 bp, Lilium asiatic
  Clone ID: LIB3230-016-P1-K1-H7
gtcttgcacggccttggagccatctgttgctccggtgtcgttaagggttaggggaggacactatactagtctatctgctcaagtgctaatgtctttaaccatgattataccaagggttactgcctgcgagctgagattatcgacacctatgcgctaatctacacagagtgctctgatactgatgcctagaggagttctacgaatactaatgtcacgattttggctccgtctcctattgcttatgaggaactcctgttacattcggcgaccatctccattactgggactgtgtttacatacagctatgagtctacgtgcggatattatctacaacaagaagcatgctatggatggtcatgggacctacaaggtt

SEQ ID NO: 4086 - DNA, 376 bp, Lilium asiatic
  Clone ID: LIB3230-016-P1-K1-H8
gtcttgcattgcattggagccatctggtgctccggtgtcgtgaagggttaggggaggacactatacgggtctaacggcgcaggtgcttatgtctttaaccatggttataccaagggttactggctgggtgctgagataatcggcacctttgtgctaatctacacagagttctcttctactgatgccaagaggagttcgaggaattctaatgtccctatgctggctccgtcgccgattgcttatgagggcttcctggtacatatgccgaccatctccatgactgggactggtattaatactgctaggagtctaggtgctgatattatgtacaacatgaagcatgcttggtatgggcattggatctacatgggttggt

SEQ ID NO: 4087 - DNA, 283 bp, Lilium asiatic
  Clone ID: LIB3230-016-P1-K1-H9
cacctttagtttcttcgcttacaacattcattgcattaccaatccgtccatcctcctcctcgtccgtctcgttggttttaatcgcattaatcgactcatctatgaggagacccgctttgtgcttaatatctttttggagaacgttatcctttactccttctcctacaccgagcacgccctccttaagacatgttacttccatgtacgtggtctactctctcaagctccatttactcaccctttacatcttcatccgttcatctatctctttatttattatgga

SEQ ID NO: 4088 - DNA, 338 bp, Lilium asiatic
  Clone ID: LIB3230-017-P1-K1-A1
gtcattctagggttttgagttgcgccgccgccaccgccccccgcaacgatggtggagaagggtagcaaggggaggaaggaggaggtggtcaccagggagtacaccgtaaacctccacaaacgcctccatggatgcaccttcaagaagatggctcctaaagctataaaagaactgaagaagtttgcacagaaggcaatggggaccaacgatgtgaggattgatgtgaagctgaacaagcagatctggagcaggggaattcgaaatgtgccaaagcgcgtccgtgtgaagattgcccgcaagaggaacgaggaggaggatgctaaggaagagctctactt

SEQ ID NO: 4089 - DNA, 394 bp, Lilium asiatic
  Clone ID: LIB3230-017-P1-K1-A10
gttgctgctcaatgtcttcggagaaggattatgcattatcacatggaagttttcaagaaagttgatataatagtgacccctacaactggtataactgcacccaaaataccatcaagtgcactaaaatctggggagtccaattatgaagtttcaggttacctaatgaggtttatattagcagcaaatcttctcggtctcccggctatatcagttcctgtcggtcatgataaagatggacttccaataggcttgcaacttataggtcgcccatggggtgaagctagcattttgcgtatggccgctgcagtagagaaactctgttcagaaaatagggggaggcctcctacattttatgatgtcctgagggcaaaatgagcaacgttttcagtgcatg

SEQ ID NO: 4090 - DNA, 398 bp, Lilium asiatic
  Clone ID: LIB3230-017-P1-K1-A11
aacagagcgaactagcaaggttgatcatcatgtctgggcgaggcaagggagggaaggggctgggcaagggcggcgccaagcggcaccgcaaggtgctgcgggacaacattcagggcatcaccaagccggcaattcgccgtctcgcccgccgcggcggcgtcaagcggatcagcgggctgatctacgaggagacccgtggagtgctcaagatctttctggagaacgtcatccgtgatgctgtcacctacaccgagcatgctcgccggaagacggtgacggccatggatgtggtctacgccctcaagcgccaaggccgcactctctatggcttcggtggttagggtttggattgtaatttggaggctagggttttaaccaggattggaatgatgtgaagt

SEQ ID NO: 4091 - DNA, 399 bp, Lilium asiatic
  Clone ID: LIB3230-017-P1-K1-A12
gagatcacccgcaagttcatgaacaaaccggtcaggattctcgtgaagcgtgacgagctcaccttggagggcatcaagcaattccatgtcaacgtggagaaggaagagtggaagctcgacactctctgcgacctctacgagaccttggccatcacacaaagcgtcatctttgtcaacacccgtcgcaaggtcgattggctcaccgacaagatgaggagcaaggaccacaccgtctcagcaactcacggtgacatggatcagaacacgagggatatcattatgcgtgaattccgatctgggtcgtctcgcgttcttatcactaccgatcttcttgcccgtggtatcgacgtccagcaggtatctctggtgatcaactatgatctgccgacacagccggag

SEQ ID NO: 4092 - DNA, 339 bp, Lilium asiatic
  Clone ID: LIB3230-017-P1-K1-A2
ttcggtcattctaggtttgagttgcgccgcgcaccgccccccgaacggtggtggggaaggtatcaagtggaggaaggaggaggtggtcaccagggagtacaccgtaaaccttcacaaactcctccatggatgcacctttaagaagatggcttctaaagctataaaagaacttaagaagtttgcacagaatgcaatggggaccaactatgtgaggattgatgttaaacttaacaatgcagatttggagcaagtgaattcgaaatgtgccaaaagccgttcctgtgaggattgccctcaagaggaactaggaggatgattctaaggaaaaactttactttt

SEQ ID NO: 4093 - DNA, 404 bp, Lilium asiatic
  Clone ID: LIB3230-017-P1-K1-A6
cggaccggatcgagaaccaggagatcaagcaccgatgattgatggctctgatgaagtgaagttctgatcagacggcgaagagggaggccgtgcatgaagactctagaagcttgtgtgagaggagatcaccattggttgtgcatgcatggtgctcggagaagaagggatgccaggcagaagacgagatctataaagccctaaggacgagcgatgaagttccccaagtctcagacgaagaagttcaccatttctctgagcctccttcatccaggaactctgcttagtgacagagtcgagttcggggaagaaggagtaggtagtagtcgtattctgttagatgatatgtatttttttttatctgtttgagttgtagtaagttagattttcattctctttcgtgtttt

SEQ ID NO: 4094 - DNA, 405 bp, Lilium asiatic
  Clone ID: LIB3230-017-P1-K1-A9
cgccgctctcccccgcctcctccttcgaaggctaggcaaggatggtgagagtcagtgtcttgaacgatgctctcaagagcatgtacaatgctgagaagcggggaaagcgccaggtcatgattaggccttcatcgaaggtcataatcaagttcctcctggttatgcaaaagcatggatacattggggagttcgaatatgtggatgaccacagatctggtaagattgtggtggaacttaatggccgtctgaacaaatgtggggttatcagcccccgctttgatgttggtgtgaaggaaattgagccatggactgcaagattgctcccttcccgtcagtttggttacattgtgctgaccacatctgcggggatcatggaccatgaagaagctagaaggaaaaatgttg

SEQ ID NO: 4095 - DNA, 400 bp, Lilium asiatic
  Clone ID: LIB3230-017-P1-K1-B1
gaaatggagatgctgaagaactataacggcaacaaagaattgcttgggaggtgtgagcagttttttctcgagctgatgacagtgcctcgagtggaatcgaagttgatggttttctcttttagacttaccttctcctctcaggcgaaagagttgcgttccaacttaatcacaatcaatgaagtatctcgggaggttaaaggttctgtaaaattacgtcaaataatgcagaccgttctttcattaggaaatgcgttgaatcagggcacagctcgaggatctgctgtgggattcaggctggatagtcttcttaaattgtcagatactcgggcaaggaacaacaaaattacactaatgcattatttgtgcaagatccttgatgagaaacagcctgagttacttg

SEQ ID NO: 4096 - DNA, 257 bp, Lilium asiatic
  Clone ID: LIB3230-017-P1-K1-B10
tcgaccgaatcacctctcctcaccggcttccaaaatcgtcattaaataaaaggctaacggaggactgcccatcactaccgcttgctgttatttcgtgttatcccgcgatcgtgtgtattacagtgttttagcctgtagattcctacaattctatttcacctgtctgcaaggcctatggtacacaatgtttactcgtcatctgaagcttttaactttgtgcctcatcaattctgctgagaattgctttgctatacgat

SEQ ID NO: 4097 - DNA, 398 bp, Lilium asiatic
  Clone ID: LIB3230-017-P1-K1-B11
cccacgcgtccgcccacgcgtccgagagaagtccgaaacccaacaccagcaatgggaagagcattcgtgtatgtgatactcggcggcggcgtcgccgccggttacgccgccctcgagttcgtcaagagggggatctctcatggcgagctctgcatcatctccgaggaatcggttgcaccttatgaacggcctgcactaagtaaaggttttttacttccagaagcacctgcacgccttccatcatttcacacttgcgttgctgcaaatgaggagagattatcgccaagatggtacagggagcatggcattgagctcgttcttggaaccgtggtaaaatctgctgatgtgaggcggaatacattggttaccgtaaccggagaaactatcagttacaaggt

SEQ ID NO: 4098 - DNA, 396 bp, Lilium asiatic
  Clone ID: LIB3230-017-P1-K1-B12
cggacgcgtgggcagccatggagttcagcaaagcgtccatctgctccctcgtcttcgctctcctcctgctgctggcttctggtccggaaatagcagaaggaggtcgaactattttctgtggaaaggttccaagcagagggtttcatgggctgtgcctgagcagcagcaactgcgcccaagtttgcataagcgagggctaccgtggtggcgactgcagcagcgtgcgacgccggtgcatgtgcaaccgaagatgcaactgagttcggacttctctaccactatcttgaaatggagcttgagtcatgattggctacatcatcagtactgtatctgtattatgtattatccactgtatccgtattatgtattaagaataataaggaggaggctcacgat

SEQ ID NO: 4099 - DNA, 398 bp, Lilium asiatic
  unsure (1)..(398): unsure at all n locations
  Clone ID: LIB3230-017-P1-K1-B3
accgaatcacctctcctcaccggctcccaaaatcgccattaaataaaaccctaaccgaggactgcccaacactaccgctgctgcgatttcggtttagcccgcgatcgtgtgtttcacaatgtcttctcctgcagaattctacaattctcttccacctgtgagcaaggcctatgggacactttgtttactgacaactgtagcatttcacttgggcctcatcagtcctgcgagtattgcgttgctatacgatttagtattttcacgatttcaggtgtggaggattattacaaattttttcttccttggtaaattttcaatcaactttgggattcgccttctcatgatagctagatatggngtgcaaacagagaaagggccctttaacaaccgaactgcag

SEQ ID NO: 4100 - DNA, 407 bp, Lilium asiatic
  Clone ID: LIB3230-017-P1-K1-B8
gaaccatggaaatgatgtatactgatatcattcaggctctccaagccaagggaattgtagcgaatcccaaggactatttgacctttttctgcttgggaaatcgggaagtgaagcagagcggagaatacgaacctgaggagcatccagaggcaggtactgactatagcagggctcaggagaaccggcggtttatgatctatgttcatgccaaaatgatgattgtggatgatgagtacataatcattggatcagccaacatcaaccagaggtcattggatggagccagagactccgaaatcgccatgggagcatatcagacgaactatctatcaaaccgtcaaccggccaggggacagattcacggcttcagattgtctctctggtacgagcatctcgggatgctcgat

SEQ ID NO: 4101 - DNA, 401 bp, Lilium asiatic
  Clone ID: LIB3230-017-P1-K1-B9
atcatcagccgattcatccccgcttatgctctgatttttttgttaactttgtttctcattgttatctatgcttggtcagttgatataggcagttcaatttatttcgaaaatctctgtttgactctcattattagtatgttttttttagtgattgaattgagtgacctggaaaaacaaggggttgtcttatgtagcaattgagcagctagttgtatttgcttatgctgaatacttgtgcgaaatgttgtgtcgaaagtctgtgaattgagacatccgcttgattatcaaaccgctgtgaagagattcatcctcggtaactcccggcggatgacaaggttcgtttggaaaaaaaagattctcaaaatgctgaggaaaagaactgtgagatgagacctcaactg

SEQ ID NO: 4102 - DNA, 401 bp, Lilium asiatic
  Clone ID: LIB3230-017-P1-K1-C1
gctcttcatctctcctcgtggctcgcaccaagcagactgctcgtaagcccactggcgttaaggccccctgcaagcagttttccactaaggtggcacgcaaatcgtctccagccaccagcgacgtgaagaagccccaccatttctgccccggcacggtgatgatgcgcgagatccagaagtatcagaagagcacgaagctcctgattcacaagctccccttccagcgccttacgagggagatcgctcaggacttcaaaactgacctccgcttccttgtgggtctgttcgaggacaccaacctgtgcgccatacacgccaagcgcgtcaccatcatgccaaaagatatccagcttgcccgtcacattcatggagagagggcatgagcacagagttagatccca

SEQ ID NO: 4103 - DNA, 263 bp, Lilium asiatic
  Clone ID: LIB3230-017-P1-K1-C2
gctcttcatctctcctcgtggctcgcaccaagcagactgctcgtaagcccactggcgttaaggccccctgcaagcagttttccactaaggtggcacgcaaatcgtctccagccaccagcgacgtgaagaagccccaccatttctgccccggcacggtgatgatgcgcgagatccagaagtatcagaagagcacgaagctcctgattcacaagctccccttccagcgccttacaagggagatcgttcaggacttcaaaaactga

SEQ ID NO: 4104 - DNA, 247 bp, Lilium asiatic
  Clone ID: LIB3230-017-P1-K1-C3
ctatgctgttggtggatatgatggagaagactacttgcggtcggcagaaaggtacgatccccgagaaggtcactggaacgagcttccaaacatgaaagtgagaaggggctgcctttctctggcttcattcaaacgggatttgtatgcgatcgggggttatgatggtaggaaaaatgtattcaggggtgggggtttcgatcccggtatgggttactggttcatgggtgagcctttgaactctttgaga

SEQ ID NO: 4105 - DNA, 182 bp, Lilium asiatic
  Clone ID: LIB3230-017-P1-K1-C6
gttagggtggaaattaaactaaattccaccccatccaaaagagggctcatgtggatagtacagccaaacaagccgctctcgaagggttcactgtcctgtattggacaggttacaatctgtaaactgggagagtcctggttttcatatcttaattctgaaatgaaacccgtggccttagttgc

SEQ ID NO: 4106 - DNA, 310 bp, Lilium asiatic
  Clone ID: LIB3230-017-P1-K1-C8
cgcacacctatggcctctctgagacctatggcccctccaccgtttgcgcttggaaacccgagtgggacggcctcccacaagagacccgggcccgtctccatgcccgtcagggagtccgttacatcggtttggaaggccttgatgtagtcaatctcaagacaatggcccctgtcccagctgatgggtcaacacttggagagattgtgatgcgcgggaacatggtcatgaagggttattttgaaaatcctgaggctaaccaagaggcctttgagaatggttggtaccactctggtgacttgggggtgaagca

SEQ ID NO: 4107 - DNA, 256 bp, Lilium asiatic
  Clone ID: LIB3230-017-P1-K1-C9
tttcttcatctgtcctcgtggctcgcaccaagcagactgctcgtaaggggactggggttaaggccccctgtaagcatttattcactaaggtgtcacgcagatcgatttcagccaccagcgacgtgaataagccccaccttttatgccccggctccgtgattatgcgcgcgatccacaatttattacaagagcactaagcttctgatttacatgctactcttacatgcttcttacgtgtgattatttgctcatgact

SEQ ID NO: 4108 - DNA, 394 bp, Lilium asiatic
  Clone ID: LIB3230-017-P1-K1-D1
gttgttccatttcgtgagaaggtgctatcatctacccgaggtcacccaccagtctgatccacatcaaggggaccgaactgaacatccacttaatcacgacttgactagaagaaagagagacttcagcagcgacattcgacgacacatatcatgtcggggagaccttgatatgcctactactgacccccaaacctacttttttaagaaattagttagactcggtatccaatagctgctgtgtcagactgatgatccgcggagataaaaacccaggacttgttgataataaggcggaagatctacctctctatataattatcccagtcgctataaccctaacgaaagtttttatcctaatgtatgtagcttgactgccccagccaggctttcaata

SEQ ID NO: 4109 - DNA, 358 bp, Lilium asiatic
  unsure (1)..(358): unsure at all n locations
  Clone ID: LIB3230-017-P1-K1-D11
ggtctggcccgatccctcttaaccgccctaatccttttccacttaacccctcccctcctccacctccccatcacgctgttcggcgccgatggcgttgatctcaacttcggcttcgtcgccgttctgctgtacggcctgttctatatgttgttggatcggaaggctggatcattggcggcgcttctctgtatactctgctgggttgggagtgatcggcttgcgggtcagctcgggtacacgctcgcgtggaaggttgttctagcttctcagttgttttgctggacctgtcaanttataggcccacgagtatttgagaagcgagcacctgctcttctggacaacctgtctcaagcccttg

SEQ ID NO: 4110 - DNA, 270 bp, Lilium asiatic
  Clone ID: LIB3230-017-P1-K1-D12
cggacgcctgggttttttttttacactggaatccatatttataccgaggtcaacgggaaattcactttttcttaaaaacttacacaacacgaaaaaaagataacactatcacactcatctctattttttaacaatccctataaacaaaccagatgtttaataacaaaaacatacttaaattatctaaataactactaccaaatgtaatttctcttactatcacacataaacaatgacatctttcaaacaactaattcattagcttgacaa

SEQ ID NO: 4111 - DNA, 329 bp, Lilium asiatic
  Clone ID: LIB3230-017-P1-K1-D4
atccagggggctcaacagtccaggtgtccaaaatgaggaagcgagccatcctggttgcacgtttaatgttgcaaatgatgcaaacacctttattttcgaatgaatccaaggacgaacagggtgatgagaagagtcctgaaagtgtttccggttcggtggagatatcaaatgactttgacagtggggaggaggggctagccatccgtatcgcaacagagattgtgaactttcccgataagaagaccgccgctggaaagttttatatctctgctctatgcaaagttgctgtgttgacacattcccgcccattggagcaagatgcaataaag

SEQ ID NO: 4112 - DNA, 370 bp, Lilium asiatic
  Clone ID: LIB3230-017-P1-K1-D8
ccatgtacttcgccggtggatttgtcgttgctaggttcttgctcgacttcttcatcttcaagccattatcttatagaattttaagtaaagagtcaggttcaatgattgacgaggctatgcagtcaaaggtcttgaagtcttctgaatcaatgtggaagctgacatattatgtaactgttcaactatgggttctttcgatcattcaacaagaaccttggtcaacagacaaaatggagtactttgaagggtggccaaaccaagaagcaaactgttctttgaagtatttctacatgtgccaatgtggattttacgtctttagcattgctgctctcctcgctggggaaactcgaagaaaaagattcttcataat

SEQ ID NO: 4113 - DNA, 343 bp, Lilium asiatic
  Clone ID: LIB3230-017-P1-K1-E10
cggacgcgtgggcggacgcgtggggcaaaacctgccatccgagaagctggataacatcgtgcagattatcaagaaaaggaacttgatgatgacacagcatgacaatgagattgaggtggatattgataatgtcgataatgagactctatgggagcttgataggtttgtgaccaactataggaagagcctgagtaagaaccggaagaaggcagagcttgctgttcaggcgagggcggagcttgaaccggatgtgatggagaagactgctgaaagtattcaggaacctgtagccttaggagtcagcaaggaagacaatgcagccgtggaggagaaaatgagggct

SEQ ID NO: 4114 - DNA, 379 bp, Lilium asiatic
  unsure (1)..(379): unsure at all n locations
  Clone ID: LIB3230-017-P1-K1-E11
cggacgcgtgggtttttttttttgactggaatccatgtttatacctatatcaacgaatatttcactgacacagaaaaacttacacaacaggaaaaaaagataacactatcacactcattactccttttctacaatccgaaaaaacaaaccagaagcacaagaacaaaaacatactaaaattcgcgaaattacttttaccgaatgtagctgctcgcacttccacacacaaacaagggcagtcaacaaacactaggctgcattcttgccctattataggaaagtcgctagaagaacgaaaacctagaccagtgcttgcagcanacaagctgtattcttcgatctttgtctctncttcgagcatgtaatattagatgcaaat

SEQ ID NO: 4115 - DNA, 395 bp, Lilium asiatic
  Clone ID: LIB3230-017-P1-K1-E3
ctgattctggatcatctgggaacataataatcgatttctattggggaatggagttgtatcctcgtattggtaaaaactttgatattaaggttttcacaaactgccgatttggtatgatgtcctgggctgttctagctgtgacttactgcatcaaacaatatgaagagaatggcagcgtatctgattccatgcttgtaaatactgtactgatgcttgtgtatatcactaagttcttttggtgggaagctggctattggtgcacaatggatattgctcatgatcgagctggattctacatatgctggggatgcttggtatgggtgccatcggtatacacttctcccggaatgtaccttgtcaaccaccctgtcaacctcggtaccccgcttgcactt

SEQ ID NO: 4116 - DNA, 404 bp, Lilium asiatic
  Clone ID: LIB3230-017-P1-K1-E4
gataaaaccaccggtcagaagaaccaggttacctttaacaaacaccaggggtagcttaacaagggttgaaattgaaaaaatggttaaggaagcagaaaagtacaggtttgaggatgaggaacacaggaggaaagtggaggccaaaaatgccctcgagaatactttttacaacatgcggaacaccatcaaggttgacaggatagcatctaagctgccagctaatgacaagaagaagattgaagatgccattgagcaggcgattcagtggcttgacaataatcagctggcggaggctgatgagtttgaggacaagatgaaggagcttgagggtatctgcaatcctatcattgctaagatgtaccagggtggtgatatgggtgctggcatggatgatgatggacctt

SEQ ID NO: 4117 - DNA, 400 bp, Lilium asiatic
  Clone ID: LIB3230-017-P1-K1-E5
cggacgcgtgggtttttgacaaacagaagctttcataattcctcaaaaataacagaaacaggagtctatcaggtgggaccaatcaataaccttcaaaggcattaaaaaaaacaaaagacaccctaaactcctaccaaaaaccataccatgagaggagatctggtcaggtcaggttttgatagcaatctaaaattttacagcgcaggtttaggcaccttaaatttaagggccaacgagagcaggtcgaaggtactcttcctcctctttaggggtgtgaatggtaacaagatcaggtaatggggtagttgggccagatttacccttgggatcccaatcaagcatgatcttcaccttgatgccaagaacaccctgtcgcagcaatacatgtcttacagctgca

SEQ ID NO: 4118 - DNA, 399 bp, Lilium asiatic
  Clone ID: LIB3230-017-P1-K1-E6
cggacgcgtgggtttttttttttgactggaatccatgtttatacctaggtgaacggatattttactgacacagaaaaacttacacaacaggaaaaaaagataacactatcacactcattactccttttctacaatccgaaaaaacaaaccagatgcacaagaacaaaaacatactaaaattcgcgaaattacttttaccgaatgtagctgctcgcactttcacacacaaacaagggcagtcaacaaacactaggctgcattcttgccctattataggaagtcggctagaagaacgaaaacctagaaccagtgcttgcatcaaacaagctgaattcttcgatcttttgtcttcttctttgagcatgtaatattagatgcaaatccacaggaaatctgttc

SEQ ID NO: 4119 - DNA, 393 bp, Lilium asiatic
  Clone ID: LIB3230-017-P1-K1-E9
atctcatcgatttttttgataatgtctgtgcgcggcaaaggcgggaagggtctcggcaagggcggcgccaagcgccaccgcaaagtgctgcgggacaacatccagggcatcaccaagccggcgatcaggcggctggcacggcgcggcggcgtgaagaggatcagcggcctcatctacgaggagactagaggggtgctcaagatctttctggagaatgtgatccgtgatgctgtcacctacacagagcatgcacgccggaagacagtgacggcgatggatgttgtgtatgctctcaagcgccagggacgcactctgtatgggttcggaggctgatcttcttctctgctattctggtcttagaggtttcgattgcttctcgctatgaatgttgtt

SEQ ID NO: 4120 - DNA, 234 bp, Lilium asiatic
  Clone ID: LIB3230-017-P1-K1-F11
ctagggttcgcttcagatctctgagtgaaaaagggcgagctaaaatgcggaagaggaaaagcaaacatcaatatgatacctctgatatacctagacatgtggttataacttttgtcaagtcactagagaaagcagagcagttctttgagttaaaggaccatcttagaggacgggttgacttccaacattacttttgtgtaccacatgaattaataaatgatgtagttgtggagg

SEQ ID NO: 4121 - DNA, 148 bp, Lilium asiatic
  Clone ID: LIB3230-017-P1-K1-F12
attcagttcggaactgttaatgacatcccttgtttgcctttggtgggaaactcaggaatttgttgggtatgtttgttttgtatattgaggctgtggttcctgactttttgagtatgacttttatgatatcatttcttttattcataaa

SEQ ID NO: 4122 - DNA, 399 bp, Lilium asiatic
  Clone ID: LIB3230-017-P1-K1-F3
cccggaccatgtaccacacatgttgaagaagtgtcacactgagatcccggacccgaaggcggtacagtacgtccgcaacgacaggggcacgccgatggtgctggacaacaactattaccgcaacatccttgacaacaaggggctcttgctggtcgaccaccagctcgcctatgataagcgcactcgcccatatgtgctgaaaatggcgaagagccaggagtacttcttcaaggagttcagcaggggcattaagattctcactgagaataaccccttgaccggtgacaagggagagatcaggctgcagtgcaacgtggctaacaagaggcactagatagtgttggtgctgagaggagtgtgtgtggtggccctcctatggatggggacggtgctgtggat

SEQ ID NO: 4123 - DNA, 386 bp, Lilium asiatic
  Clone ID: LIB3230-017-P1-K1-F8
atcctgacttggctgaggggagcactgcctctaccactatgatcatggggtttgctcctgctaagggggagtttgaggggtttgagatgtatgctgagaatggtggctgtggctgcaagtgtggtgataactgcaactgcaacccctgcaagtgtggcaagtgagctctccatgagaggaggatgtagggtttgataccctttgtttacttgtttctgttgtagtgctgaataatggccatggtttacatgatgcaagcttttttgcaccgtgagtggttcaccagtggcttctagtgtcttgtggtggtgctgtgttggttttgtatggtctgttgaaattactgaagtgttgtttttagtattttatctaaatggaatattatt

SEQ ID NO: 4124 - DNA, 385 bp, Lilium asiatic
  Clone ID: LIB3230-017-P1-K1-F9
gaagttcgacttttcgagctgtgattggcttgtgaggtttgccaatatcccgtagtttttcgtatgtttctttaaacttatggactcaaaatttcggaagtgatccttgtggagaaggaatactggaactagagaagcatctaacaagataactaactggttatcagtttgaatggagttgtttatgtggaaccgattaccaacaaaaaaagaaaaaaaaaaaaaaaaaaaaaaaaaaataaaaaaaaaaaaaaaataataaaaaaaaaatatattaaatattaataaaaaaattaataaaatataaaaataaaaataatatagggggggccccctttaagggatccaagtttacttcccctggctgtggaagtaatagtttttt

SEQ ID NO: 4125 - DNA, 393 bp, Lilium asiatic
  unsure (1)..(393): unsure at all n locations
  Clone ID: LIB3230-017-P1-K1-G1
aattttatctctgttctgtgccaaagctggagcaaaacatgtatacgcggtggagtgctctctcatggctgatatggcaaaagagattgttgaaaaaaatggtttctccaatgtcattacaattctcaagggaaaggttgaagagataactcttccagatgctcatgtacatgtcatcatttctgagtggatcggctattttcttctatttgaaaatatgttaaacacagtcctgtatgcacgtgacaaatggctgatagatgacggacttgtgttgccagacaaagcgtctctttatttgacagccattgaggatgctgaatacaaagaagacaaaattgaattctggaataatgtttatgggtntgacatgagctgcatcaagaaacagtc

SEQ ID NO: 4126 - DNA, 390 bp, Lilium asiatic
  Clone ID: LIB3230-017-P1-K1-G11
ctagggttcgcttcagatctctgagtgaaaaagggcgagctaaaatgcggaagaagaaaagcaaacatcaatatgatacctctgatatacctagacatgtggttataacttttgtcaagtcactagagaaagcagagcagtactttgagttaaaggaccatcttagaggacgggatgacgtccaacatcacctctgtgtaccagaggaatcaataaatgaggtagttgaggaggtaaaagctgatggaagattcaagatgcttgatgaagaagatattctgcgtgctgcagatatgctccatcgggaattgctatatgcatatcttagtgaaatagcacccacgtacatcagaaatcagaagactaacagcactgcagaaatagcggcag

SEQ ID NO: 4127 - DNA, 148 bp, Lilium asiatic
  Clone ID: LIB3230-017-P1-K1-G12
attcagttcggaactgttaatgacatcccttgtttgcctttggtgggaaactcagtaatttgttgggtatgtttgttttgtatattgaggctgtggttcctgactttttgagtatgacttttatgatatcatttcttttattcataaa

SEQ ID NO: 4128 - DNA, 370 bp, Lilium asiatic
  Clone ID: LIB3230-017-P1-K1-G2
tctcaatctctctcttatctccttatcgccatgggaaagatcaagatcgggatcaacggattcggaaggatcgggcgcttggttgctagggttgcactccagagcgatgacatcgagctcgtcgccgtcaacgatccgttcatcacgactgattacatgacatacatgttcaagtatgacacagtgcacggccagtggaagcaccatgagataaaggtgaaggactcgaagactctcctatttggcgagaagccagtcaccgtctttggtgttaggaatactgaggagatcccatggtgtgaggctggagctgacttcagagtggagtacactggtgtatgaactgacaaggataaggctgctgctcatt

SEQ ID NO: 4129 - DNA, 383 bp, Lilium asiatic
  Clone ID: LIB3230-017-P1-K1-G7
cgtttttgaagcagccgaaggtgttcctcagctctaaaaagtctggcaaggggaagaggcctgggaagggcggtaaccgcttttggaagagcgttgggctgggattcaagactcccagagatgccattgaagggacatatattgataagaaatgcccattcactggcagtgtctcaatccgaggccgaattcttgccggcacctgccacagtgctaagatgaaccgaaccatcattgttaggcggaattacctccactatgttaagaagtatcagaggtatgagaagcgacattccaatattcctgcccattgttccccctgtttccgtgtgaaggaaggagatcatgtcatcataggccaatgcaggcctttggcaaagact

SEQ ID NO: 4130 - DNA, 395 bp, Lilium asiatic
  Clone ID: LIB3230-017-P1-K1-G8
gctggacgcaaagcaaaagttagaactggagattcagcaattgaaagggacactgcagatgatgaagcatatgggaagtaatgacgagtccatgaacaaaaaagtagaagagatgaatgaggaactgaaagagaagatcgaagaaatggaagacaagcatatgggaagtaatgacgagtccattaacaaaaaagtagaagagatgaatgaggaactgaaagagaagatcgaagaaatggaagacctcgaagctcttaatcaggctttgattgttaaagaacggaaaatcaattatgagttgcaggatgctcgaaaagaattgattacggccctgaaagataagttaacccgcgggtcatccattgctataaaaagaatgggagaaatagacgaga

SEQ ID NO: 4131 - DNA, 393 bp, Lilium asiatic
  Clone ID: LIB3230-017-P1-K1-G9
gaaccctagttttcgaaacagctgagatggagaccggatccaaggccaagaagggcgccggcggacgcaagggcggtccaaaggctaaatcggtgagtcgttctgtaaaggccggacttcagtttcctgttggcaggattgggcggtacctcaagaagggtcgctatgctcagcgtgttggttcaggagctcctgtctaccttgctgccgtccttgagtatcttgctgctgaggttcttgaattggcgggcaatgcggcgagggacaataagaaaaatcgaattgtgcctcgacatgtgtgtttggcggtgagaaatgacgaggagcttgggaggttgttgggtggtgttaccattgcccatggcggagtcctccccaacatcaacccagtct

SEQ ID NO: 4132 - DNA, 398 bp, Lilium asiatic
  Clone ID: LIB3230-017-P1-K1-H1
caagatttctctagatcaggagagagagagagagatgggcaccggatcttttctcaaagttgtggcgaaaaacttcgatgttctcgccgggccttttgtgacactggtctatcccttgtatgcttcggtcaaggccatagaaaccaaatctccaattgatgatcagcaatggctcacttattgggtgctgtactctatgcttacactcttcgagcttacttttgccaaagttattgaatggctaccattctggactcatgcaaaactgatcctgaactgctggttggtcctaccctatttcagcggcgcagcctatgtctacgaacatttcgtcaggccattatttgtgaagcaacaaactgtcaacatctggtatgttccaggaaaagaagatgtct

SEQ ID NO: 4133 - DNA, 402 bp, Lilium asiatic
  Clone ID: LIB3230-017-P1-K1-H10
gaaattcagaacattgctcgaaagaaacctctttatatgggtaatctgaatctgctgcacaggcctctcagaactggaaaatgggcagttacatttgaggaatggcctgaggagatatatccaccctatgccaacggccctgggtacataatttcaagtgacattgcgagacatatcattgcaagacacgccaatcaaagccttaggctgtttaagatggaggatgtgagcatgggaatgtgggtcgaagagttcaacagtacctccaccgtccagtactcgcacaactggaaattttgtcagtatgggtgcacagagaactactacactgcacactaccagtctccgcggcaaatgatatgcctttgggacaaattggcaaggggccgcccccagtgctgt

SEQ ID NO: 4134 - DNA, 403 bp, Lilium asiatic
  Clone ID: LIB3230-017-P1-K1-H11
cggacgcgtgggtcatcatgtttgatgttactgcacgccttacctacaagaatgttcctacttggcatagagatctttgccgagtatgtgagaacattccgattgtgctttgtggcaacaaagttgatgtgaagaacaggcaggtgaaagccaaaatggtcactttccacaggaagaagaacctccaatactatgagatctcagcaaagagcaactacaattttgagaagccttttctgtatttggccagaaagcttgctggcgatcaaaatcttcactttgttgagtcaccagcccttgccccacctgaggttcagattgaccttgtggcacaacaacagcatgaggcggagttacaaagggctatgttgcaaccccttccggatgatgatgatgatctcat

SEQ ID NO: 4135 - DNA, 402 bp, Lilium asiatic
  Clone ID: LIB3230-017-P1-K1-H12
ctttggaggtacaccatttaattgtttatttcaagcactcatccaaataatcttgaaagttaaagtcataatatagttgaacaattaccatctttgttttaattgggaacaaatttttgagttagtcttattttaatctatgccataagatgttctttaaaatatattttaaatatggtacaattttatttctttctcaaattggtccgccattgtatgtacagtttggaagcttcgactatgttccttattgagaatcctaaaacaactaggaaatcacaacggtgacaaagcgaggttatatttaattggcttgggctgatgtattcttagttgagtgagtctgtggccttgatggcaccttaattggtgtggctgtgtgtctcgtcagctaggatggtg

SEQ ID NO: 4136 - DNA, 143 bp, Lilium asiatic
  Clone ID: LIB3230-017-P1-K1-H3
atgtccgggcgaccacacgatctgtatagttgaggattttgtttaagatgtaggaactatgtcttaaaatggaagagggttaatgatgtttacactatttgtaatttgttaacaaacagaagcccatctggatgaggaaacct

SEQ ID NO: 4137 - DNA, 389 bp, Lilium asiatic
  Clone ID: LIB3230-017-P1-K1-H8
aaacattgcagtgaagagtggtcctcttttagatatgcaccatgaatgtttacccaatacaagctgccatcacgaatgtgattgcggggattgaatttcccacagcacttgctgctgttgctgaagacaactgcagacctcggtagaagaagacgagtgaattaagagccgagaagaactgcacagccaccatggccatgactggcttgtaccccgccatagcttcaaattgcagaggtttaggagaactggattagcaggaggatgatatatatacctcaattgcgccaaatatcctctcatgggctttaaagttgaggcctatcgttcagtgacaaaaggcgaattcagttgctttctgcaatataaaatagagttgacaaaagacg

SEQ ID NO: 4138 - DNA, 392 bp, Lilium asiatic
  Clone ID: LIB3230-017-P1-K1-H9
ggaaagttgaggatgttgatgaagagaaggaagagaaggagaaaaaaaagaagaagataaaggaagtctcacacgagtgggaattggttaacaaacagaagcccatctggatgaggaaacctgaggagatctcgaaggaagagtatgctgctttctacaagagcctcaccaatgattgggaggagcacttggctgtgaagcacttctcggttgaaggccagctcgagtttaaggcagttctctttgtgccgaagagagctccatttgatctttttgataccaagaaaaagcctaataacatcaagctttatgtccgccgtgtcttcatcatggacaactgtgaagaattgatcccggaataccttagctttgtcaagggtattgtagattct

SEQ ID NO: 4139 - DNA, 455 bp, Lilium asiatic
  Clone ID: LIB3230-018-P1-K1-A1
tacaaaccccccaaagctcgccgagctctcaaaccctccggcgatggcgatgtcggcggcgaacatcggcatgatggacggcgcgtacttcgtcggcaggaacgagatcctcacctggatcaacgccacgctccagctcaatctctccaagatcgaggaggcggcgtctggggctgtgcagtgtcagatgatggatatggtgcatcccggcattgtgccgatgcacaaggtgaactttgatgcgaggacggagtacgatatgatccagaactataaactgctgcaggaggttttcaacaagctgaagatagagaagcatgtggaagtcaacagactcgtcaaagggcgaccgctggataacctggaattcttacaatggttgaaacgctactgtgactctgggaatggtggaattatgaatgaaaactacaatcctgtggagagaagatgcaagg

SEQ ID NO: 4140 - DNA, 375 bp, Lilium asiatic
  Clone ID: LIB3230-018-P1-K1-A11
agcgaaggcagggtcgtcgatcgtgaagaaggtggcaatcaatttaggatacaacttcttgagaaggaactgtagaagtccgaatgtggtgcttcgagtgcctccgtcgtctctcctcacggttgggatggtttatgtcctttgaaccgaaactgtttgagcaatcaaggaaactgtgctatgttggcgcatcaacataggctgatcgcctgctcagagataaacaggtttatgctgtggacctcgcgtttcaacacataaaaaactaaaagtaaaggatctgcatattgttgatgatggaaatgctcgcaggtaaaacctgaagttccaatgtgccattgaaatgatgtatgtatcaaatattgataaagatga

SEQ ID NO: 4141 - DNA, 345 bp, Lilium asiatic
  Clone ID: LIB3230-018-P1-K1-A12
agcgaaggcagggtcgtcgatcgtgaagaaggtggcaatcaatttaggatagcgggcttcttgagaaggaactgtagaagtccgaatgtggtgcttcgagtgcctccgtcgtctctcctcacggttgggatggtttatgtcctttgaaccgaaactgtttgagcaatcaaggaaactgtgctatgttggcgcatcaacataggctgatcgcctgctcagagataaacaggtttatgctgtggacctcgcgtttcaacacataaaaaactaaaagtaaaggatctgcatattggtgatgatggaaaatgctcgcaggttaaaacctgaagttccaaatgtgccatt

SEQ ID NO: 4142 - DNA, 439 bp, Lilium asiatic
  unsure (1)..(439): unsure at all n locations
  Clone ID: LIB3230-018-P1-K1-A2
gaangggnggggcgggcttcgcgtcaaaccccccaaagctcgccgagctctcaaaccctccggcgatggcacagagcggcgtgtagacattggtatgatggacggcgcttacttcgtcggcaggaacagaatcctaagctggatcaacgccacgctccagctcaatctctccaagatcgaggaggcggcgtctggggctgtgcagtgtcagatgatggatatggtgcatcccggcattgtgccgatgcacaaggtgaactttgatgcgaggacggagtacgatatgatccagaactataaactgctgcaagaggttttcaacaagcttaagatagataagcatgtggaagtcaacagactctttaaagggcgaccgctggataacctggaatttttacaaaggtttaaaccctacttggactctgtgaatggtggaatt

SEQ ID NO: 4143 - DNA, 406 bp, Lilium asiatic
  unsure (1)..(406): unsure at all n locations
  Clone ID: LIB3230-018-P1-K1-A7
cggaactgtggctctccgtgagatccgcaagtaccagaagagcaccgagcttctgagccgcaagctccccttccagcgtcttgtccgggagattgctcaggacttcaaggccgatctccgcttccagagctcggcggtgtcggcgctgcaggaggcgtcggaggcctacctggtggggctgtttgaggacactaacctctgcgccattcacgcaaagagggtgactatcatgccgaaggatatccagctcgccaggaggatccgcggcgagagggcttgatgttgtgaatggttcgctactcgcgaaaatgttggaaaatggtttctgttgtctttgttctactttggtggattaactagctatcaaacttctgggattgctcaaaattcttcaanaaaaaaagga

SEQ ID NO: 4144 - DNA, 364 bp, Lilium asiatic
  Clone ID: LIB3230-018-P1-K1-B10
aatacagtaactaccagccaggttcactgaatacaacagatcaaattgtcaaggacatagacatcattgctattgtcttccacgtaggagacatggcatatgcaaatggttatctttcacaatgggatcagtttacatcgcaagcagaggacattgaatccacggtgccatatatggttgctagtggcaatcatgaacgtgattggcctgggtcagggtccttttatgaaggcaatgattcaggtggggaatgtggagtcatttctgaaacaatgttctatgtaccagctgagaacatggcaaaagtttggtattctacagattatggtaatgtccatttctgcgtagctgacactgaacatga

SEQ ID NO: 4145 - DNA, 279 bp, Lilium asiatic
  Clone ID: LIB3230-018-P1-K1-B11
aatacagtaactaccagccaggttcactgaatacaacagatcaaattgttatggtcggagacattattgctattgtcttccacgtatgagacatggcatatgcaaatggctatctttcacaatgggatcagtttacattgcaagcttaggacattgaatgcacggtgccatatattgctctctagtgacaattatgaacgtgataggcctgggttagggtccttttacgaaggtaatgattttcgtagtgaatgttaagttattttttaaacaatgttc

SEQ ID NO: 4146 - DNA, 402 bp, Lilium asiatic
  Clone ID: LIB3230-018-P1-K1-B12
ggatggagagatatttgccaccataaatcaaaaagatggaatggtcaatttccatgaggaccctgaggaatataaaagttgtgagatgatagagcatattgatacatcaattcagaggttgatggccctttcgaagaagctgagatcaatagatgagcggatatcttgtgatcctacttacgtgacaaaggctgggaaagagaagtcaagattcgattttgatgactttgattctgttcctcacaagttcttttaactatagcttttcaggtccagccatataattaaaacagtaaaatgtttgcaattgtgctagtcttttccagtttaatttgaagtttggttggtgactttccaggttctgcaatgacttgcagatgatgtgtttatgttgggtggcac

SEQ ID NO: 4147 - DNA, 435 bp, Lilium asiatic
  Clone ID: LIB3230-018-P1-K1-B7
gcttctaccaaatggcaccttagcagaccatcttaatggaaagcttgtaacaaaggaggcactcacctttgatgtgagaatccaaatcgccatcgacacggcacaagcccttgcatacctccaatccttttacccacctgttgtccacggcagagtcaagacagataccattctgcttgacaacaacttcaatgccaaagttgtagatctgggcctatgtcatctcttacctactgataaacagatttttatagatctgggcctacgtcatttcttacctactgtaaacgagcagcataacaagctcagtgcaaagtgggatgtgtacagctttggggtggtcctgatggagcttatatctggtagtcaagttgtggacatcaaccgtgaatgtgacgagattcatgtcaccagcttacacaaaaagttgaaact

SEQ ID NO: 4148 - DNA, 280 bp, Lilium asiatic
  unsure (1)..(280): unsure at all n locations
  Clone ID: LIB3230-018-P1-K1-B8
ggcttaaaccaaaagccaccttancagaccatcttaatggaaagcttctaacaaacggtgcactcaccttttattttacaatccaaatcgccatccacacggcacaagcccttgcatacctccaatccttttacccacctgttgtccacttcatattcaatacagatactcattctcttgacaacaacttcaatgccaaaaatgtatatctggtcctatgtcattctcttacctactgataaacatatttttatatatctgttcctacgtcatttcttac

SEQ ID NO: 4149 - DNA, 429 bp, Lilium asiatic
  Clone ID: LIB3230-018-P1-K1-B9
agtaaatggaaggctccactaggacatggagagtatgttagtccaaaggttcctctagcaactctttcatcaccgctcccaaagcaaatggaaagctaagaaagagatgcaactaaatctcatttaagagagattgcttgcccccctctcattcaactcagagaaaataatatttacaaccatgttcatgaaactaaagtttagataaagacctactaacatgaaaaagaacttcaatttcttcctcacatgattcgagtcaaataacaactcaagttcaagttcgttagcgcttgtatagattaaacctctgatatttttctcgagtcatatcaattaaggaatatttaagtaccatcataaggacataataggtgttcacatctatatccacttgtagaacttattttgactcttttcattcgtatt

SEQ ID NO: 4150 - DNA, 401 bp, Lilium asiatic
  Clone ID: LIB3230-018-P1-K1-C1
cccacgcgtccgcggacgcgtgggggtataactacatcatccttctccatatactgcacctacagttccttttcctgtttgtaatagcaacactcctcaaatccgtagctcgattgccactacagattatccacacccttcatttcccccaggcatcacagcaaacaggcttgcctctgcagttgataacacttctggtgacaagaataagaacataagtggagcaagatcagagttgaaggttctggaccatgccgatcaacctagaaaacgtcctgcaggtaaagaagccgatttcatgaaacctttgaaaagacctttttcgagaatgcacgatggttcaaatgcttcaacatgccataagagaaaagaacaactgcatgggtacccatggcataata

SEQ ID NO: 4151 - DNA, 332 bp, Lilium asiatic
  Clone ID: LIB3230-018-P1-K1-C10
aaactgcctttccggaagctatagagttgatgaagctgttggtattattcgtatgatggtgatgaacgatgtggtgcctgaggttgtgaataccattagcgatgttgataagagggatattgcagcaccgaagattcttgtggaagaattattgaagaagggtcatataacatattatacttatgaacttctttacgatggaattagggataagaagttcgtgaggaaactgcgcctgatgtagttgtcctgagtatcatactacattaatctaatgtttataaatgaatatctactatttgatagtcggcttagtattaaatatcatatta

SEQ ID NO: 4152 - DNA, 421 bp, Lilium asiatic
  unsure (1)..(421): unsure at all n locations
  Clone ID: LIB3230-018-P1-K1-C11
cgatgaagggtttgctctcccttgtgctggctcttgcactggctcaggcctgtgcgaggagcactccaggtcaagtcagtgtcagcacaaaccacgctgacagcgccgctgccggcgttggtgatcaaaagaactttttctatgctggaggcattggtgggattgctggcgggggtgttcccggactcggctttggcggaggtgttcccgtcgttggtgctggtgttggtggcttgggtgggctcggtggtggcattggaggagccagcggcctcggggctggtgccggcagtggctttggcggtggtgcaggtggtggcttactaccatgagttgggtgttggtttagtttacgcgagtaatgcatgcatgcagtangttgttgcaagggtcgtggttgttagggttttgagtttagttt

SEQ ID NO: 4153 - DNA, 196 bp, Lilium asiatic
  Clone ID: LIB3230-018-P1-K1-C12
cgatgaagggtttgctctcccttgtgctgtctcttgcactggctcaagcctgtgcggtgagcactccatgtctagtcagtgtcaacacaaaccactctgacagcgccgctgtcggcgttggtgatcaaaataacattttctatgcttgatgcattggtgggaatgctgtcagcgttgttccctgactctgcttttg

SEQ ID NO: 4154 - DNA, 359 bp, Lilium asiatic
  Clone ID: LIB3230-018-P1-K1-C2
gggacatggtatcagctctccaactactgctcttaacggcgggttcatctccactccagagcaatctccatcacctgaagacatgagcccgagtcctgcagcagctgccgccctttcgatatcgcaagcggccaaccgttttctcaatgggggcagtgctcatgggttgctccgccgtgtgtcagtcaacggtgaatccaatgaggccggcagcgaattgaaacaaagtgctgagcacaacttgccggacagtccttttgcatctccaacccgagcattcggtggtgcggactcattctcttcatcctccagcagcgaagctgaagccacttcagtgtctcctcacagtgacaccagtg

SEQ ID NO: 4155 - DNA, 338 bp, Lilium asiatic
  Clone ID: LIB3230-018-P1-K1-C3
cccacgcgtccgagcagatgaagaggatggtgatgaaattgacagtctcaggcttcaaaaattagcagcccaggcaaaggcatttgaggtgaatggtgaagatgatgatgatgactcagacgatgattttagtgacgatgatgtgatggagtcgccaattgatgaagtggaccctttcattttctttgttgaagcaatacaagttgtgcaaacggtgaatccaacaagaatccagaacctgatgcaaaccttagactttcgccatcaggcactagccagtggcattgctcaacatgctgaagtgaggagagctgagattgttaaagagaaacaagaga

SEQ ID NO: 4156 - DNA, 294 bp, Lilium asiatic
  Clone ID: LIB3230-018-P1-K1-C9
aaactgcctttccggaagctatagagttgatgaagctgttggtattattcgtattatggtgatgaacgatgtggtgcctgaggttgtgaataccattagcgatgttgataagagggatattgcagcaccgaagattcttgtggaagaattattgaagaagggtcatataacatattatacttatgaacttctttacgatggaattagggataagaagtcgttgaggaaactgcgccgtatgaagtgttcctgagatcatactacataatctaatgttgataaatgaatatcaac

SEQ ID NO: 4157 - DNA, 385 bp, Lilium asiatic
  Clone ID: LIB3230-018-P1-K1-D10
ctcctcaaagccctagttttcaacctaactggaatggagaccggatccaaggccaagaagggcgccggaggccgcaagggcagcggctcaagggcgaagtcggtgactcgctcagtcaaggcggggctccagttccccgtcggaaggatcggccgctacctcaagaagggccgctatgcccagcgcgtcggatctggagctccggtctacctcgctgccgtgctggagtatctcgctgctgaggttttggaattggctggaaatgcagcccgggacaacaagaagaaccggattgttcctcgacatgtgtgtctggcggtgaggaatgatgaggagcttgggagggttgttgggtggggttactattgctcatggtggagtttta

SEQ ID NO: 4158 - DNA, 410 bp, Lilium asiatic
  Clone ID: LIB3230-018-P1-K1-D11
cccacgcgtccgctagatgatgaaataacaaagttgggattgaaaaccaagcattatgaggataacctgaagcatctccggattcagctggatgacaatgataaatccattcttgatctagaagttggttttgaaaggtataatacaactgtgaggggagaaagcattcacattccttctactgagcaacacactggaatgtataataagtcaggagaaatcagcagctggcataatatgcaaactaaaaaggcatcatgggctgcaagcttcaaggttgccagtgtccaaatgatgttgttgtcgttgtagcttcacttggaaaagtaggcgatgataatcttagcaggcttttatcagagttcttgggattggacactatgatgggtttgcttgcaagacatatgaaa

SEQ ID NO: 4159 - DNA, 174 bp, Lilium asiatic
  Clone ID: LIB3230-018-P1-K1-D12
acgcccactcgatcgctagatgatgatttatctaagattggattgtaaaccaagcggtggtgaggataatcttgtagcatctacgcattcatttagatgacaatgaaaaatcctttcttgatctataagtagtttatgaaagggattatacaactgttatgtgagaaagcataa

SEQ ID NO: 4160 - DNA, 370 bp, Lilium asiatic
  Clone ID: LIB3230-018-P1-K1-D2
ctcagctttccgaagaatcaagatggcctgtggcagctagctcagtacggaatctaaccagataataaggtggttctgcttagtgctgaatgttgtgcctctcagcattgctcttctaattgggtgttttaaagtcttggcgacttctcactgtcgaccaaaagccatttttgctttagtagtctgctagggaactgttgaatgatgatttcagagaaaatgtgcctgtcattccaaccgaggctccagctcttggggagcccatggatctgatgactgccctacaactggtgatgaagaaatcactggctcatgatggacttgttcgtggcctccatgaaggcgccaaggtcatcgaaaagcatgctgc

SEQ ID NO: 4161 - DNA, 415 bp, Lilium asiatic
  Clone ID: LIB3230-018-P1-K1-D4
ccaaatcatacatctatgtgccctgtacgcactggtcacaagctctaaatcatcagggctctaggtggaattcatgcatagatgattttctggcaagcactctgctgagcgtgtgattggaagcctttagtgaagtgcatatctgatgataacatagagaatggttgtttgctgaccagaaacagacacactgcctcgtcttccttctcaccttcaacattgacagaagtttgtcatttacaaataagtatgggcattacatatgccactgattttttcatttacgaagcctgtgctggaatgatgaagcttagccaaatcatacatctatgtgccctttaggcactggtcacaagctctaaatcatcagtgctctaagggggattcatgcttagatgagtttctgccaagcact

SEQ ID NO: 4162 - DNA, 407 bp, Lilium asiatic
  Clone ID: LIB3230-018-P1-K1-D5
aatccatttccggatcaccttgccctccttgccaagaaattattttgatgtcatgccatggccaacatattggggaagaaagatcgatgctttgttccagtaagagacagtttccatgtcaaaacctatgtggaaatcttctttcttgtggtaatcattactgcacaaaaccatgtcatgtgctgttgtcgtcagagactaaaagcagacttgctgagccatgtgaaaagtgcttccttccttgtcaaaaggtcagggaacctgcatgttcacatccatgccctctactatgccattctgatgagtgtcccccttgcaaagttcttgttaaacgatcctgtcattgtggtgcaatggtgcatgtttttgagtgtatgaactatggtaacttgacggaaaaagagcag

SEQ ID NO: 4163 - DNA, 326 bp, Lilium asiatic
  Clone ID: LIB3230-018-P1-K1-D9
cggacctctttctctccggcgatatgatggcgtctcaggcgaatctggaggttatgaagctccggcagaactacaggaacctctggcacaccgacctcatgagcaccatccaggccgattttcccttttgctgcttggcactctggtgtgggccatgtgtgtcatacatgctgcgcaagagagccctttataatgacatgtccaggtatgtctgttgtgcgggttatctaccatgtagtggcaagtgtggagagagtaaatgcccagaattttgtctttgcacagagggttttctatgctttggtaattcaggtgcctcaacacgc

SEQ ID NO: 4164 - DNA, 299 bp, Lilium asiatic
  unsure (1)..(299): unsure at all n locations
  Clone ID: LIB3230-018-P1-K1-E1
gctcaccatactgactgcacgtttatccgggtgtctggttctgagcttgttcagagttgtggttgttttgggtacttctnggtttgtgaacttattgatttttttttttttgttttttttttttatttttttttttttttcatgtgtgtataatctccagaagctttttgctgtcgatttgtgcgttttactgtgtttgttttggttttttatttttttcaagtttttgttgttttttttttttttttttttttttttttttttttttagcttttttttgatttttttgtttaatattt

SEQ ID NO: 4165 - DNA, 336 bp, Lilium asiatic
  Clone ID: LIB3230-018-P1-K1-E10
agtatgtccagacccggtcagagcttgtatgagaatcaaatgaaacagtacaggtgggaacaggagcagatatctaacatgaaggagtacattgctcggtttggacatggttctgccaagctggcccgtcaagctcagagcaaagagaagacccttgccaagatggagcgtggcgggctcacagagaaggtgtctagggacaaggtcttagtctttcgtttcaccgatgttggtaaactcccccctccggtactgcaatttgttgaagtctcctttgggtacactcccgacagtctcaattacaagaacatcgaatttcggggtggttcttgattt

SEQ ID NO: 4166 - DNA, 378 bp, Lilium asiatic
  Clone ID: LIB3230-018-P1-K1-E11
ccctgctatcattgtcggggctggggtatttgagcggaaagataacgatgcaatatttgctgctgttgagaccatagcgaagaatgcgaaagtcaccagaccggactggaatggactcaacgtcctcctcatcaatgctgctcaagctgctgcccttgaccttggccttctatccgatcccaaggagagcatcaagtctgctaagcttctctatcttatgggagctgatgatgtgagcttagaaaagcttccaaatgatgcttttgtggtttaccaggggcatcatggtgacaggagtgtttatagagccaatgtgattctcccgtcagtggcattcagtgagaaggaaggcacgtatgaaaatactgaaaggtgtgc

SEQ ID NO: 4167 - DNA, 221 bp, Lilium asiatic
  Clone ID: LIB3230-018-P1-K1-E12
acctgctatcataaaccgaacttttttttttgagcggaacgcacactaaggggtgggggctgctgtcttttccattccacacaatacaaaagttatcataccactcagtaatggactcatcgccctccttaatcaatctgctcacgctgaaaaccttgacttttccctactatatcatcttatcaagaatatcaatttttctaaattacattatttcatag

SEQ ID NO: 4168 - DNA, 313 bp, Lilium asiatic
  Clone ID: LIB3230-018-P1-K1-E3
gcggcttgagtttcttggtgactcggtactggatttcctcatcacctggcaccttttcaagacccacacagaggttgatcctggggagttaactgacctgcgatctgcttcggtaaataacgaaaattttgctcaagttgcagtaaagcataaacttcacgagcatcttctacattcttctggcttgcttcaggcgcaagtaacggagtatgtgaaaacgcttgatgggccactcgaagaccgaaatttgctttcggtggatggcactactaaatgtcccaaagttcttggagacattgtggaaagtatttct

SEQ ID NO: 4169 - DNA, 298 bp, Lilium asiatic
  Clone ID: LIB3230-018-P1-K1-E4
gcgtccggcggcttgagtttcttggtgactcggttctgtttttcctcatcacctggcacctggtggggacccacacttaggttgatcctggggagttaactgacctgcgatctgcttcggtaaataacgaaaattttgctcaagttgcagtaaagcataaacttcacgagcatcttctacattctatctggcttgcttcaggcgcaagttacggagtatgtgaaaactcttgatgggccactcgaagaccgaaaattgctttcggtggatggcactactaaatgtcccaaagtttttg

SEQ ID NO: 4170 - DNA, 389 bp, Lilium asiatic
  Clone ID: LIB3230-018-P1-K1-E5
cggacgcgtgggcttttagcaactatttggcctccgctcctcccgcggaacaaaagaacttgcttgggaacaggctctatcctcttgttgagaggcatcagcccgaactcgcgagcaaaatcactgggatgctcttggagctcgacaactctgaagtggtcacgttgctttgctcgtcggagatgttgtcggtcaaggtcgacgagtgtgtccagctgttgcaggcaaccaagcctaaggctgaggatcatgaggcgctgcacccaggattcatgctggagcctcggcctcctactgtaaatgccagttgatgaggttctgattgcgcggatgagcttctggatgcgcttgtgtttagggatatggtaacaagctagtcgctagctgct

SEQ ID NO: 4171 - DNA, 431 bp, Lilium asiatic
  unsure (1)..(431): unsure at all n locations
  Clone ID: LIB3230-018-P1-K1-E6
cggacgcgtgggtcaagacatgctcaataagtatttaacatatgccaagcttaatgtctttccaaaattacatgatgctgatttgaacaagataacacttgtctatgctgaactgcgcagagagtcatcatttggtcaaggtgtcccgattgcagtaaggcatattgagtcgatgatacggatgtcggaggcacatgcaagaatgcacctgaggagttatgtcacacaggaagacgtggacatggcgatacgtgtgttactagattctttcatctcaactcagaaatttggggtacagaaagctctacaaaagagcttcagacagtacataacctacnaagaggatcacaatggaattcttttacatcttctgcgtgaacttgtggaggctgctcttcactttgaagaaattatgactgggacttacattt

SEQ ID NO: 4172 - DNA, 224 bp, Lilium asiatic
  Clone ID: LIB3230-018-P1-K1-E7
tggacgcgtgggtcaagacatgctcaataggtatttaacatatgctaagcgtaaggtgttgtcaatactacatgattgctaatgtgaacaatataactctttgtttatgctgtactgcgcagagagtcatgtttggatcgaggtgtctcaattgtatctaagttatattgtgtttattgtaccgttgtctgacgcacatgcaagaatttatttgtggagttttt

SEQ ID NO: 4173 - DNA, 409 bp, Lilium asiatic
  Clone ID: LIB3230-018-P1-K1-E8
gtttttgaatctgatggcacgcaagatgaaggacactgattctgaggaggaactcagggaagctttcaaggtttttgacaaggaccagaacggcttcatttctgctgctgagctccgtcatgtgatgactaacctcggagagaagctgactgatgaggaagttgatgagatgatacgggaggctgacatggacggcgatgggcaggtgaactatgaagagtttgtgaggatgatgctggcaaagtgagtggcagcatctttcctccatgggaaaagcttgctagttatctgacccagaaaatcttgtaatagaagtcaactctttactatcatccctgctagttccgttcaaaactggacaaaacatcttataatctgggttagtagctgttttgagtttatgacattt

SEQ ID NO: 4174 - DNA, 327 bp, Lilium asiatic
  Clone ID: LIB3230-018-P1-K1-E9
agtatgtccagacccggtcagagcttgttgagaatcaaatgaaacagtacaagtgggaacaggagcagatatctaacatgaaggagtacattgctcggtttggacatggttctgccaagctggcccgtcaagctcagagcaaagagaagacccttgccaagatggagcgtggcgggctcacagagaaggtgtctagggacaaggtcttagtcttccgtttcaccgatgttggtaaactcccccctccggtactgcaatttgttgaagtctccttcgggtacactcccgacagcctcatctacaagaacatcgatttcggggtggatc

SEQ ID NO: 4175 - DNA, 52 bp, Lilium asiatic
  Clone ID: LIB3230-018-P1-K1-F10
acgactactcttgatgacatcattgatcaatattttgcttaggtagccctaa

SEQ ID NO: 4176 - DNA, 331 bp, Lilium asiatic
  Clone ID: LIB3230-018-P1-K1-F11
tttaatcaactgtggcaattttataaaatcaccataacaatcatacacttcacaaatgcatatatatacatcactaagagttcttccagaggcaacaaggtattaatacataatcgtggataaagatcccttgcttgagatcttcataacaagaatataagtaattttatataggattaatcgaaattataatgctgcatcacccgttgcctccatgccagcatagtttcggatcatattcctcgttgaaggcaatcctgcaacagggtcctcttcaatcccgcattcattcgttccccgtcttatcttgaagaaaccatcatcaccccag

SEQ ID NO: 4177 - DNA, 384 bp, Lilium asiatic
  Clone ID: LIB3230-018-P1-K1-F12
aatcccctctcaaatccctctgatggcgccaaaatccgagaagaagcccgccgagaagaagccggtggcggagaagcctgccgccgaggaggagaagaagtcagccccggcagcggcaccggcggagaagaagcccaaggctgggaagaaggtcccggcctccaaggagggcgagaagaagaagaagaggtcgaagaagtcggtggagacctacaagatctacatattcaaggtgttgaagcaggtccaccccgacatcgggatctccagcaaggccatggggatcatgaacagcttcattaacgacctcttcgagaagatggctcaggagtctgctcgtttcgcccgctacaacaagaagaataccatcacctcccgggagat

SEQ ID NO: 4178 - DNA, 340 bp, Lilium asiatic
  Clone ID: LIB3230-018-P1-K1-F3
agctgttgggcctgaacccaccatggtggatttggtgaccgtttatgttcggcttcttcgggataatgaggctgaagtgcgtatagctgctgctggaaaggtaacaagcgtatgccgggtattgagcccacaagttgctattcaacacatccttccctgtgtgaaggaactgtcatcagattcgtcgcagcatgttcgatcagctttggcttcagtaattatgggcatggcgcctgtcctggggaaggaggcgactatcgagctacttcttcctatatttctctctctgattaaagatgagtttcctgatgtcagactcagtattatcagcaaactggat

SEQ ID NO: 4179 - DNA, 406 bp, Lilium asiatic
  Clone ID: LIB3230-018-P1-K1-F6
ggaatggacaaatgagaaaattgacactgagatggatactgttaatgcagcagtgagttgcattcgatcacttcgcccacctagtgataaaacaagacggccagcttttgcactttgtcaagacgatgatgttgctaatactattaagacctacgagtttgagattgtaacactcgcttccgtatcatccctagaggttttaagagaacatgacaaccgcccagctgggtgtaaagttgaggttgtgaatccaaatctttctgtatatcttcatcaaggaatacttgatacagaagctgaacgtgaaaagctgaggaaaaaaagagaagaaatagaaaagctacattcaagcttggctcagaagatgagtatgttgagttacaaggaccaaagctcccaaaatgtg

SEQ ID NO: 4180 - DNA, 349 bp, Lilium asiatic
  Clone ID: LIB3230-018-P1-K1-F7
aaaatttaaacctcgctggaattgatcgagcttttgtatgcacagccatatcctcaactagggtgttcttcacacactgtgccctccgacttaaaagatcagggacaaatattccgagaatggaattggttgaggttggaccctcgatggacttggtggttcgtcgtcaccgccttcccaatgacagcttaaagaaagaagcaatgaagacggtctctcaccaagctaagaagataaaaaatgttagcaaggatccagtgcaaggaacactagggagggtatacattccagaccagcaggttggagggatggctttgtcgaaagatgttaaaggggctgagagggagcg

SEQ ID NO: 4181 - DNA, 220 bp, Lilium asiatic
  Clone ID: LIB3230-018-P1-K1-F8
aaaatttaaacctcgctggaattgatcttgcttttgtatgcacagccctatggtgaggtagggtgtactacacacactgtgcactccgacttaaaagatcacggacatatatttcgagaatggaaatgattgaggttgtaccactataagacttggtggttaggacgcacctgtcttctaatgatagcttaaagaaagatacatagtacacggtctctta

SEQ ID NO: 4182 - DNA, 336 bp, Lilium asiatic
  Clone ID: LIB3230-018-P1-K1-G12
gtctaccttggtggaggggccagccacatcagatgttcctccggtgaagctggccaaggtgaaggccacgaaggctcccaaggaaaggaaggccgtgacgaagaagccggccctacatcctacctatctcgagatgatccgcgaggcgatagcgtccctcaaggagcgaaccgggtcaagccagtacgcgatctcaaagtttgtagaagacaagcacaaggcttaccttccggccaactttaagaagttccttcttgttcagctgcggaaactcaccggtgctggcaaactcaccaaggtcaagaacttctacaagatcgctgcaaagcctcttgc

SEQ ID NO: 4183 - DNA, 388 bp, Lilium asiatic
  Clone ID: LIB3230-018-P1-K1-G2
cgacgacaaaagctagggtttcgccggtgttctcctccgatccgctagggtttctcagggcttccggcgcggaagtccggctgtcgattcaggcagcaggtagaaggcatcgggttttggttccgggcttaggtttctggtttcgtcgagaacgtccgatcgattcgcgtcgatcgggaatctgagctttcgggggagtcgggatttgaagataacgttgtagcgatggagacatgggaagatgatgattttgagccagttgcacctgctaagttagaactgccaaaaagcaagtgggacgatgaagatgtagatgatcaagatgtaaaagagtcttgggaggatgatgaagataccgcagagccacccaaaccagatcctgcagtag

SEQ ID NO: 4184 - DNA, 166 bp, Lilium asiatic
  Clone ID: LIB3230-018-P1-K1-G3
tccgcgacgacaaatagctagtggattcgctcggtgtatctcctaccagatccgataggtgtttctggagggggtggccggcgctgaatgatcgacttgtcaatatcaggcagctaggtcttaaggtcatctgggttatcgtttccacgtcttaggtctttctggg

SEQ ID NO: 4185 - DNA, 341 bp, Lilium asiatic
  Clone ID: LIB3230-018-P1-K1-G8
atttttcatttgaggcggtctcagtttgttcaggttttcaataatagtccagatgagactgcatactatagaatgattctaaatagagagaatgtagccaactcggttgtgatgatccaaccttcattgctatcttactccttccagctggaacctgagcctgttctgcttgacgtagctgcaattgcatcagatgcgatcttgcgtctggattcctattttactattgttgtattccacggtataactattgcacaatggagaaatgctggctatcaaaatgaacctgaacacaaggcgtttgctcagttgctgcaagctcctcgtgatgaagctgatgc

SEQ ID NO: 4186 - DNA, 229 bp, Lilium asiatic
  Clone ID: LIB3230-018-P1-K1-G9
atcttatatttgaggcggtcttagtctgctcaggtcatcaataatcggccagaggggactgcatactatagaatgacgctacatcgagagattgtctccaactcgtgtgcgaagagccaaccttcatcgctatcgtacgtgtttcagctggaacctgcacctgttagtgcttgtcgaagctgcactcgcatcagatgcggatcttctgtatggattcctattttactat

SEQ ID NO: 4187 - DNA, 347 bp, Lilium asiatic
  Clone ID: LIB3230-018-P1-K1-H1
cgcgatcggattcgaggaggaggagcgatgtcggctggaggggaggaggacaggaagccgtcggccgccgctgatgcggggaatcatatcaatctcaaggtcaagggacaggatggcaacgaggtgttcttcaggattaagcgccagacccaactgaagaagcttatgaatgcctactgtgacaggcagtcagtggacttcaattctattgcattcctttttgatggtcgcaggctgcgagctgagcagaccccggatgaacttgagatggaggatggagatgaaattgatgccatgctgcatcaaactggtggaggaggtaatggtccgtgacatctgtagtttta

SEQ ID NO: 4188 - DNA, 412 bp, Lilium asiatic
  Clone ID: LIB3230-018-P1-K1-H12
ggaaggacgatgttgtggtgaaagagtcgaccttggctgagctgttccgtgggaggaagaggatgagtgctggtactggatctattgaccggtcaaaaagggcgaggaagcttggtgacgtgtttgattggattgctgctgagaagggcactgagacggtgagcgaggtggtaagcacaacctcgacccggacacggagcagaagtcctattgtggttgagactgatggtttgcctgcaaaggaaacttcagctcctcgtcgggtatctctgaggaagaaagctgtttagagaatttttaccttgttttattttgggagtttcaatcttggtgatagaatagttgtggtttgacttcaaaataagccttttaaggctgtttcagaggaaacttaatgcatccagtgatgtat

SEQ ID NO: 4189 - DNA, 370 bp, Lilium asiatic
  Clone ID: LIB3230-018-P1-K1-H2
cgcgatcggattctaggaggaggagcgatgtcgtctggaggggaggaggacaggaagccgtcggccgccgctgatgcggggaatcatatcaatctcaaggtcaagggacaggatggcaacgaggtgttcttcaggattaagcgccagacccaactgaagaagcttatgaatgcctactgagacaggcagtcagtggtcttcaattctattgcatttcttgttgatggtcgcaggctgtgagctgagcagaccccggattgactttagattggtgatggagatgaaattgatgccatgttttattaatttggttgaggaggtaatgtgcctctgacattttgtagttttatttttagcttaaaactttatt

SEQ ID NO: 4190 - DNA, 406 bp, Lilium asiatic
  Clone ID: LIB3230-018-P1-K1-H5
cgagtaaaaagtattacagggaaccctttgagccagtcatgcctggagtcacatttgtggagtatggaaacatccaagaagtcaaaaaagcaatacaacccggcaaaactgcagctgtttttgtggaacctatacagggtgaaggtgggatacatagtgtcacaaaggagtttctacaatcacttcgttctgtttgtgatgattctggagcactcctagtttttgatgaggtacaatgtgggttaggccgaacaggccgtctctgggcccatgaagcttacggtgtgacacccgatatcatgacgctcgccaaacctctcgccggaggcctgccgattggcgctgtactgatgactgagaaggtggcttctgcaatgagatatggagaccatgggagcactttcgc

SEQ ID NO: 4191 - DNA, 312 bp, Lilium asiatic
  Clone ID: LIB3230-018-P1-K1-H6
cgagtaaaaagtattacagggaaccctttgagccagtcatgcctggagtcacatttgtggagtatggaaacatccaagaagtcaaaaaagcaatacaacccggcaaaactgcagctgtttttgtggaacctatacagggtgaaggtgggatacatagtgtcacaaaggagtttctacaatcacttcgttctgtttgtgatgattctggagcactcctagtttttgatgaggtacaatgtgggttaggccgaacaggcctgctctgggcccatgaatcttacggagtgacacccgatatcatgacgctcgtca

SEQ ID NO: 4192 - DNA, 415 bp, Lilium asiatic
  Clone ID: LIB3230-018-P1-K1-H8
gatgaagggtttgctctcccttgtgctggctcttgcactggctcaggcctgtgcgaggagcactccaggtcaagtcagtgtcagcacaaaccacgctgacagcgccgctgccggcgttggtgatcaaaagaactttttctatgctggaggcattggtgggattgctggcgggggtgttcccggactcggctttggcggaggtgttcccgtcgttggtgctggtgttggtggcttgggtgggctcggtggtggcattggaggagccagcggcctcggggctggtgccggcagtggctttggcggtggtgcaggtggtggcttactaccatgagttgggtgttggtttagtttaacgcgagtaaatgcatgcatgcagtaaggttgttgcaaggggtcgtggttggtaggggttttg

SEQ ID NO: 4193 - DNA, 218 bp, Lilium asiatic
  Clone ID: LIB3230-018-P1-K1-H9
gcggatgaagggtttgctctcccttgttctggctcttgcactggctcaagcctctgctgggtgcactctttttcaagtcactttcagcacaaaccacgctgtcagcgccgctgcctgtgtttgttatcaaaataactttttctattcttgagtcattgttggtatagctgtctgtggttgttcctgtcttcttctttttctgatgtgtttccgttctt

SEQ ID NO: 4194 - DNA, 418 bp, Lilium asiatic
  Clone ID: LIB3230-019-P1-K1-A10
gggcttgtaattgtaattgttgcttgacattgatcatcaataaagtatcaaggagggttgtcggtttgttgacataggccaagattgggccgaaccacatcatatcagtgtctttgctcgtgcttgttgtattgttgcttatgttcagtgtggttgttcaagttgtttccagtactctaatatatcgcgggcttgtgttgcggattgtgatttattgtgtggtatatgtgcatctaaggtgttcagtggattaccacattaaggagttgtgatctcgcagtggtgctctcatccagtaggtgggaagttgtgcgccaacatctcctcctatgaccccaactctaactcctctcattactccttacattgtttattgacatctgaagcacatgtatcatcttaattaagatccacccag

SEQ ID NO: 4195 - DNA, 419 bp, Lilium asiatic
  Clone ID: LIB3230-019-P1-K1-A9
cagcaaacaggcttgcctctgcagttgataacacttctggtgacaagaataagaacataagtggaacaagatcagagttgaaggttctggaccatgccgatcaacctagaaaacgtcctgcaggtaaagaagccgatttcatgaaacctttgaaaagacctttttcgagaatgcatgatggttcaaatgcttcaacatgccataggagaaaagaacaactgcatgggtacacatggcataatattgtaacaccagaatatcatatgaacagtaatacaaaagcggatgtcagcattccagcagtgactaaagagaaagaaggcttgggaactgcatctggatcatgttcggtgtcaagaccaggacctatcaaacttagtgctggagcgaagcatattctaaaaccaagtctggatatg

SEQ ID NO: 4196 - DNA, 420 bp, Lilium asiatic
  Clone ID: LIB3230-019-P1-K1-B10
cggacgcgtgggcggacgcgtgggtatgaagtgtaggcgattcccctgccgccggccgtctcggcgatcaggtcagttaccatttttgatcaagttttcgtccaaggagatcaaaagagcgactaatggattcagcacggtccttcaaagtcattctgatgaaaccatctacagagctcgattttcagatgatcacgttgctacggttaaaaaggttagaccttctcaacaaggcatcgatgcgttctatacacaggtgcagctccttgggtgcctgcatcatcgtcatcttgtcagccttcaagggtttactgaaggacatgataggtttctcatctttgatcacatggaaaatggtactctgagggaatgtcttcacgatccgctaagaaccccgttgaattggaggactagattaca

SEQ ID NO: 4197 - DNA, 420 bp, Lilium asiatic
  Clone ID: LIB3230-019-P1-K1-B12
caaatagtgtcccttttttcggatacaacatttaatattgttcccacaagtgctcttaggcttcttcgagggtcaacgcagctgtggcgatgaagagctggactctcaataatttcgacattgggaatccgctgggcagagggaagtttggtcatgtgtacttggcaagagaaaagacgagtaatctcattgtggctctaaaagtcctctttaagacccagctgaagcaatctcaggtggagcaccagctgcgccgcgaagtcgagatccagagtcacttaaggcatccaaatatcttatgcatttacgactatttctatggtcagtcccgagtttatttgattctagagtatgcggtgaaaagggagcagtacaaggagctgcagaggtgcaagtacttcgaggagaggcagactgcaa

SEQ ID NO: 4198 - DNA, 431 bp, Lilium asiatic
  unsure (1)..(431): unsure at all n locations
  Clone ID: LIB3230-019-P1-K1-B3
nnnnnnttcgtcggcgccgaagagcgattccagatctggtttctttggtgcacggatttctttttgttgagcgacaatggaagatgatgccaacgctggaaagaaggaagaggaggagttcgccaaggggcccctctccgttctgatgctcagtgtgaaaaataatacccaggttctcattaactgcaggaacaacaagaagctacttggtcgtgtcagggcattcgaccgccactgcaacatggtccttgagaatgtcagggaaatgtggaccgaggttccaaagacgggtaaggggaaaaagaaagctctcccagtcaataaggatcggttcatcagcaagatgtttcttcgtggggactctgttatcatcgtccttcgaaaccccaagtgaagagaggatcgtcgttgctggatacttggccatcctt

SEQ ID NO: 4199 - DNA, 423 bp, Lilium asiatic
  Clone ID: LIB3230-019-P1-K1-B4
gcaatcagcggcgcacacacagagttgatcgtcgccggcgtgatgtcgtacctgctgccgcatcttcactccggctgggccgtcgatcaggcgatcctcgccgaggaggagcgcctcgtcgtcatccgcttcggccacgactgggacgaaacttgcatgcagatggatgaggtgctagctgctgttgcagagacgataaagaactttgcggtgatatacctggtggacattacggaggtgcctgacttcaacacgatgtatgagctgtatgacccttctactgtgatgttcttcttccgcaacaaacatatcatgatcgacctgggcactggtaataataacaagatcaactgggcgctcaaggataagcaggaattcatcgatatcatagagacagtctacaggggtgccaggaaagggcgt

SEQ ID NO: 4200 - DNA, 423 bp, Lilium asiatic
  Clone ID: LIB3230-019-P1-K1-B5
ggggtcaccaaggggtaccggtacaagatgaggttcgtatatgctcattttccgatcaatgcgtcgattacgaacgggaacacggcgattgagatcaggaatttcctcggcgagaagaaggtgcggaaggtggatatgcttgatggagtaacagttctgaggtctgagaaggtgaaggatgagctggtcctagatggcaatgatattgagcttgtgtctcggtctgctgctcttattaaccagaagtgccatgtgaagaaaaaggacatcaggaagttcttggatggcatttacgtgagtgagaaaggaaccatgtctgaagagtagtctcatcttttgtagcatgcaagggaatgtctcatcttttgtccttgtttgagaagaatcttatctggttagactaatttttattgtctttgtttg

SEQ ID NO: 4201 - DNA, 391 bp, Lilium asiatic
  unsure (1)..(391): unsure at all n locations
  Clone ID: LIB3230-019-P1-K1-B6
nnncggacgcgtgggcgggcttgtaaccttgcaaagcaggcttttgatgaagctattgcggagctggatacacttggagaggaatcttacaaggacagcactctcattatgcagctcctccgtgacaacctcaccctgtggacctcagacatgcaggatgatgttgacgagatcaaggaagcacccaaacgagacgatgagtagtagcaacttcaaacaagtccagcattctgtttatggaattctagtagatagctgaatgatgcctgttatcttatattttatgggatttttaggtgttttatttctcgttagtttgtagcccgtctcttgtgtttcgacttggatggtccctatcattttatcctctaaatcagtggctttcgtgccc

SEQ ID NO: 4202 - DNA, 419 bp, Lilium asiatic
  Clone ID: LIB3230-019-P1-K1-C11
gacgtcttgaaggttcacatgcaggtgaaccctgggaagtacagcagcatattttcgggtctacatctcttaattaaagaacaaggcccttcatccctttggagaggctggtctggcaaattatttggatatggtgctcaaggtgcctgcaagtttgggctttatgaatacttcaaaaaaatgtattctgatgtactggtgggacaggataaaggtgtcatcttccttgccagcagtgcatctgctcaggtaatcgcggatgttgctctttgcccttttgaagctgtcaaggttcgtgtgcagacacgacctaattttgcaaagggcttaggtgatggctttccaaagctgtatgcctatgaaggtttgtctggcttctacaggggacttcttcctctttggggtcgaaatcttccatt

SEQ ID NO: 4203 - DNA, 421 bp, Lilium asiatic
  Clone ID: LIB3230-019-P1-K1-C12
cccacgcgtccgggggacgatccatgctcatggctccgagactgttaagatcccggtgaccttaatatttgatgatatcaagagtacataccatgaaatcaagccagggagcatcattccgtacagaatcaaggttgaccttattgtagatgtaccgattttcggaaggatcactctgcctctggagaagaagggtgagattcccatcccatacaagccggatgttgacgttgagaagatacgcttcgcaaagttctcatttgaagaaaccgtggcggacctccacctgaaactagagaataagaacgactttgatctggggctcaatatgctggactacgagttctggctctctaatgagagcattgcatctgcggagctcacagagtccataaaaattgagaagcagggagtctgtcgg

SEQ ID NO: 4204 - DNA, 425 bp, Lilium asiatic
  unsure (1)..(425): unsure at all n locations
  Clone ID: LIB3230-019-P1-K1-C3
nncgaatacttaaagtttaataacttgtctggtggtgtgatcattttttttatgtagatgatatgttgattttggaaccaaccttgagatcacgagaagatttaaaaggttcttatttgagtactttaatatgaagaatttggaagaggtagtgccatcctgggaattaaaataataagaaatttcgaaggaataacattatcccaaacccatcatgttgagaaagtactaaaaaagtttgagcggaccatttgatccttctgttcatctaaggatgttggtccaagtttctctgcattagactactctagggtactagatagtcttatatgtatcatgaactatacttaacatgatgtagtctcatttatattatgaactatagtaaacatgatatagactatgtgatatacaaacttagtgca

SEQ ID NO: 4205 - DNA, 144 bp, Lilium asiatic
  Clone ID: LIB3230-019-P1-K1-C6
ttttttttttttttttttttttttttttttttttttttttttttttttttttgtttttttttttttttttttttttatttttttttttttttttttttttttttttttttttttttttttttttttttttttattttttttttt

SEQ ID NO: 4206 - DNA, 421 bp, Lilium asiatic
  Clone ID: LIB3230-019-P1-K1-C8
ctctgggagacctacgccggcaggaggctgcttttactcacttccaacttgcttgctaccacagagatatctgtttgaaatttttggattcggatgaaaaactagtaaacctttcgaagtatgaaaacaagcgtcaaaaggccaagtggtatgcttccttggctgagaagaactggcataagtccctggaattctacggtccaacgacacatcctgttatgtaccttaatatcctatcggagcagtcagcactttctttcagcctttccaatatatttcactcaagcactatgttggaagcagcactagtcctattattggatggccggaaaataattgaagagaacggtgactatgccgatattgtggatcctgatatcagtgcgaaattttggaatcaattacagtccctgctgaaaag

SEQ ID NO: 4207 - DNA, 428 bp, Lilium asiatic
  unsure (1)..(428): unsure at all n locations
  Clone ID: LIB3230-019-P1-K1-D1
ngtcgattgtgaagaaggagcctctcctccgggggcgaagtacttcatcacagaacaatgactaccgaagaagactcgatcgaacaagctagtaatgctcgccgtgagatgctgaaggcactcagagcagcaaaagagttttcgagcatgccagacggggatgcactccccagtgaagacaaaccagaagatgcagtgaatggtcgtggagaaatgtctgttgaagatgacatgacagaacatgataccaataaagaagattcagaggaaaccgaagacaaaggactgagaatgaaattcagaaattaccttcctcatgataagaaactccagcagggtaagttgcccgcccctgtcctacccaagtttgaagaccccgtcgccgctgaccctcctccgcctaccaaaactgaggatccttttgtaaa

SEQ ID NO: 4208 - DNA, 421 bp, Lilium asiatic
  Clone ID: LIB3230-019-P1-K1-D11
gacattttcgtcaactaatgtgtttactaatcggaaagaagccgagcaagatgtttcgagggttgctcttgagggtattgctaagaacttgaagactaaaggagtgccgctgctccggaatgatactgtcttctgcaaatctattctacatgagtttgcatcgaagatgaagatagaaccaccaaaatatacgtctaacgagtcgaaagggcttcttccaatgtttatcacttcagtagcatttgatgggaatacttacacaggcagtgaaggaaggactaaaagagaggcagaacagattgcagctcgtgctgtaattgaatctatcttaggttctagcactggaactacaatgtcacaaattataaagtcgaagagtagactctatgatgcaatccataaaggcaatgggtctggcaca

SEQ ID NO: 4209 - DNA, 422 bp, Lilium asiatic
  unsure (1)..(422): unsure at all n locations
  Clone ID: LIB3230-019-P1-K1-D12
ccatttgcgccaacttatggagtgatgatancttaaagaagccgagcaagagggagcgggggttgttctttagggtatacctaacaactcgaagactaaaggagtgccgatgttccggaatgataccgtcttctgcaaatctattctacatgagtttgcatggaaaatgaatattgagccacgaaaatatacgtgtaacgagtcaaaagggcttcttccaatgattatcacttcattagcatgtgatgggaatacttacacaggcagtgatgtaaggacttaaacagaggcagagcagattgcagattagtgccgtaattgaatctatcttaggttctaacactggtactacaacgccacaaaagattaagactgagtagtatactctttgatgcaatccataaaggtaattggtctgttac

SEQ ID NO: 4210 - DNA, 419 bp, Lilium asiatic
  Clone ID: LIB3230-019-P1-K1-D8
ctcggaatgtatttgcggagtacagaaataagttttcccaaggtaaggagcctctttacaaagatgttgaagggggtggaggtctcgttctgagtaccggagagatagaaaggttagagcaattgaagaaaaaggaggaggcagaagtgaagagtttcgaggaagagaaggagaggcgttgtgcagaagaaatgataacggaatttgcgaaagggtggaatttgaagttcactgaatatgatcagctgatagctaacttggcaacaaagctaatgaagcacaaagaagacttcctccttataaaggaaagctatgcaagcgcaaaacttttagaagccaaatccgaggaagactgaagacatgctttaccttgccagtgccatatcaagtattagggagtttagtgaagttgtgggata

SEQ ID NO: 4211 - DNA, 423 bp, Lilium asiatic
  Clone ID: LIB3230-019-P1-K1-D9
gagtcccgcccacaaacccccatcaggagaaacactagcgccgccccctccgccaccgctgcccctcgccggcggccatcccccatcaccgcccgctcaggtgctgaaggaactaacatggccacacctacagatcaagccaagaaagaatatgcagaatttactgaaaaggtgaagagaactgtttttattgacaacctgtctcctgcagttacggaagcagtcatcaaaactgctcttgggcaattcggaaatgtgaaaaatgtagagttcataccgaactacacaataccttataatatcccccattctgcattggtggaaatggagaatcccaggcaggcaaccaatatagtcagtgatatggcgaactatcctttcatgatgtctggcatgccaaggcctattagggctgcccctgca

SEQ ID NO: 4212 - DNA, 331 bp, Lilium asiatic
  Clone ID: LIB3230-019-P1-K1-E1
aaaaaaaaggaaaaaggagaaaaaaagaaaaaaaaagaataaaaaagggggggagagaataaaaaaaaggaaaaaaaaaaaaaaaacgaaaaaaaaagaaaaaaaaagaaaaaaagaaaaaaaaaaaaaagatgaaagaaaaaaagaaaaaaagaaaataaaaaaaaaaaaaaaagaaaaaaaaaaagacaaaaaaaaaaaaaaaggaaaaaaaaaagagaaaaaatagaaaaaaaaaaaaataaagagaagataaaaagagaaaaaagaaaaaaaaggggaaaaaaaacaagagaaagaaacaaaaaaataaaaaagaaaagggggagag

SEQ ID NO: 4213 - DNA, 423 bp, Lilium asiatic
  Clone ID: LIB3230-019-P1-K1-E10
cggacgcgtgggcaagcttcgagagaggagcttttggagtccggaaaggctgataccctagcggtctctgcagaccaaagaggcaggctgttaatgtcaactgagagactcaaccattccagcgaaaggatcaaagagagtagaagaacaatgctggagacagaagagcttggtgtttcaattcttcaagatctgcatcaacaacgccagtccctcttgcatgcaaataacacacttcatggggtggatgataatattggcaagagcaggaaaatcctgacagcaatgtcgaaaaggatggataagaacaagtggatcatcggcagcatcatcgtcgttctggttcttgccattcttctcatcctgtacttcaagcttgcccgttgatttgttagtccgtttatgtatgctgtgctaattgtg

SEQ ID NO: 4214 - DNA, 350 bp, Lilium asiatic
  unsure (1)..(350): unsure at all n locations
  Clone ID: LIB3230-019-P1-K1-E2
ntgctgggaagcctaaagccaaacctgctgctgcaaagctgaagacatcagtgaagtcgaaggctgctcaaccaaagcctaagactgctggtcgactccctaaggcagggaaggcctcagccaaagccactccttctaccaagccgaagaaggctgctccagttgctgccaagaagccgaagactgtgaaaaaggcgccggcagtgaagaagacctctgctgtgaagaaggcctagttgtaaatctgctttgggttttttttgggtgatgggtagtgagttgtatatctgacagtgttgttgggcgttggcgtcttggactaaataaatatttgttgggtgaagttgttg

SEQ ID NO: 4215 - DNA, 423 bp, Lilium asiatic
  Clone ID: LIB3230-019-P1-K1-E4
ccggtaccttcgcccttgttgagggagtcagcgtctggaacggcctggtacttgaaatcgtcatgactttcggactggtctacactgtctacgccaccgctatagacccgaagaagggtagcattggtaccattgccccaatcgccattggtttcatcgtcggcgctaacattcttatcggtggggcgttcagtggtgcctcgatgaacccggccatcgcttttggcccggcattggttagctggagctgggcgagccactgggtgtactgggctggtccgctcatcggtggtggccttgctgggatagtctatgaggtcttcttcattgatcatcattcgcatgagccgctcccctccgccgactattgaacgaatcgagatctttgagtttggagtttgaatttcgctatgatctttgttt

SEQ ID NO: 4216 - DNA, 426 bp, Lilium asiatic
  unsure (1)..(426): unsure at all n locations
  Clone ID: LIB3230-019-P1-K1-E5
ncggacgcgtgggtgagaaattaaactttaggaaacaaagatgtcataacttgaaccaccagtgaaatcccttcaaactaggatcaccccagttgtttgcagacccacaagagagtctgaatcagtaaatcaaactagtctcttaacttgagaccttcccagcaattgaactcatatctttgaattgaatttggaagctagactatggcatagtgacattagaaggtttgactaggagaactccaaaagaggagggataaccaaaaagtccctcttagttaggggatttaaccagacccagtgattgaaacatgaaatccctctagttggggcatcggaccagaagctgtgacacacttgatcctgtgaactttgataaggctaaaggccttcacatgaactcaaaccagtgaccattcctggtag

SEQ ID NO: 4217 - DNA, 413 bp, Lilium asiatic
  Clone ID: LIB3230-019-P1-K1-E9
tagaaaactacttaacaattgaatgctctgattttcatgtctatatttcttgccatctctgagagtggctattgtagtacaagggtcttatatagcagcacccttctcttactggaatcttggatgcacaacttatgcatagtccgtcctagtggcccaagcatagcggccctcttggacggacgtgttttagggactgcatctgaatcagctagtagagggtgaccttggagcactgtagagggtgaccttggagcaacagtgaagggtgacgccttgtgacctggaagttatgggtataaatccagaaacagcctcccagcatgcaagggtaaggctgcgtacatctgaccctccccagtaacccgaagttgtgggagcctcgtgtactggttgtcctcattatctgattc

SEQ ID NO: 4218 - DNA, 243 bp, Lilium asiatic
  Clone ID: LIB3230-019-P1-K1-F1
ctaattttcttcttacacccaaactccactaaccctaaccaacaacatctcttaaactgttatcacacacactctctttcttctcttactaccttcctcataccatcctaccactctcttcactttaatcattcatcctcatctaccatcaaacaaaatcactttactattatttcaaactatacattaacaaattatctaacttcatttcatttatatcttaaattcacataaaatattcta

SEQ ID NO: 4219 - DNA, 428 bp, Lilium asiatic
  unsure (1)..(428): unsure at all n locations
  Clone ID: LIB3230-019-P1-K1-F12
nnagcgcggacgcgtgggcggacgcgtgtgtttctaagccgattcaagatgcagatcttcgggagaccctcaccgttttgaccatcactcttgaggntgagagctccgacaccatcgacaacgttaaggccaagatccaggataaggaaggcatccccccggaccagcagaggctcatctttgctggaaagcagctggaggatggccgtacactcgctgactacaacatccaaaaggagtccaccctccacctggtgcttcggctcaggggaggtatgcagatttttgtcaagaccctcacagggaagacaattaccctggaggtcgagagctcagataccatcgacaatgttaaagccaaaattcaggataaggaaggcatcccccctgaccagcagaggcttatcttcgctggcaagcaacttgaa

SEQ ID NO: 4220 - DNA, 429 bp, Lilium asiatic
  unsure (1)..(429): unsure at all n locations
  Clone ID: LIB3230-019-P1-K1-F2
nnnnnngacgcgtgggggcggattcgatgtcgaggccaggggtgtcgccgggaagctggattacggttcccccaagatgtcaatctacgccaaaggggtctcagtactgatgcctggttacgatataccaacattcatcgcacatcctgcccctgcaccctgcctgcccgagagaatatcatggccgacacacgaacagaaccagaccggtgcctctgcaccaaattcaagttaaacatctgtgtggcagccttgactcaccctacttcggattctttgctttttgcaagttgagccagctgcgcactgaagcttctcatcctgtacccatttttcttgttcaggcttagtctggtccctcagctatctgtaagatgtccaggggcatcagaggaagaacattagtgaatgtgtacagttttgatgtac

SEQ ID NO: 4221 - DNA, 425 bp, Lilium asiatic
  unsure (1)..(425): unsure at all n locations
  Clone ID: LIB3230-019-P1-K1-F4
nctcgtcgccgcagttctactcctattcgtttctgctaagaaatctcgggatgtgacggagctacaagtgggggtgaagtacaagccagaggcttgcagtattcaagctcataaaggcgatcagatcaaagttcattatcggggaacactaactgatggaacagttttcgactctagctatgagaggggcgaaccaattgaatttgggcttggtaatggtcaggttatcaaaggatgggaccaagggctactcgggatgtgcgttggcgagaagcggaagctaaggattccttcaaaacttggctatggagaccaaggatcccctcctaaaatcccaggtggtgcgacactgatcttcgaaacggagcttgtcgctgttaatggaaagactggaggggaattgtccgatgctgattccgatctat

SEQ ID NO: 4222 - DNA, 197 bp, Lilium asiatic
  Clone ID: LIB3230-019-P1-K1-F6
taaccgtttagaccaacactcttgagagttgagagctacgacaccatcgacaacgttaaggccaagatccaggataaggaaggcatccccccggaccagcagaggctcatcttcgctggaaagcagctggaggatggacgtacactcgctgactacaacatccaaaaggagtccaccctccacctggtgcttaggct

SEQ ID NO: 4223 - DNA, 418 bp, Lilium asiatic
  Clone ID: LIB3230-019-P1-K1-F7
cccacgcgtccgcggacgcgtgggcaagccttgaaaggagagtaactatgagagcctttggggcaaacttggtacttaccgaccccaccaaggggatgggaggaacagtgaagaaggcatatcaactcatagattcatatcctaatgcttacatgcttcaacaattcaacaatccagctaatgttaaggtgcatttcgaaaccactggtccagaaatatgggaggatacattgggccaagtggatatctttgtaatgggcatagggagtggaggcactgtaacgggtgtcgggaaatacctcaaatctatgaaccccaatgtgaagatatacggtgttgagcctgctgagagtaatatactgaatggtggtaagccaggtccccatgctattaccggtaatggagttggatttaagcc

SEQ ID NO: 4224 - DNA, 420 bp, Lilium asiatic
  Clone ID: LIB3230-019-P1-K1-G1
gtttttgtggcattaatgatggctcagatcgaggtcctaaggaagaagggtcattcctactcggagatcatcaacgagagtgtgattgagtcagtggattccctaaacccttttatgcatgctcgaggggtttcgttcatggttgataattgttccacgactgcccgtttgggttcgaggaagtgggcaccgcgtttcgattacattcttacccagcaggcgtttgtggctgtggacaataatgctgcaatcaatgaagaccttcggagcagtttcttggttgatccgattcatggtgccatcgaagtatgtgcgcagctgaggcctactgtggacatatcagtgcctgctgatgctgatttcgtgcgcccggagttacgtcaatcgagcaactaaggttagtatcagggtggtggttga

SEQ ID NO: 4225 - DNA, 423 bp, Lilium asiatic
  Clone ID: LIB3230-019-P1-K1-G11
aaatttctgaaattgtccaagaagaatggtatgagaaagcattaaggaaagcggagggggaagcacataaggctgaaaatatgatcgagcataaagatgaaatcttttctcgacctaaaagaacctggtttacatctgaaaatgtcaacaagcttatatcctatgctgttcattattccttcatataaaatcctcctcttctattctttttcactaagcggcacaacttaaaatgaaggaaaaaagacgagtggagcatgagaaacacctaccacgtaagaaaaggccaaggttgtaagccattaatgagatgcttgtgaatgaaataggaagacaatatggaacaggaaactggaggtggcaaaaaaagagaaaaccggacaatcactagttgatcttgctcaccgtcgagcaaaatccatg

SEQ ID NO: 4226 - DNA, 415 bp, Lilium asiatic
  Clone ID: LIB3230-019-P1-K1-G12
cggacgcgtgggcggacgcgtgggctccaagccgattcaagatgcagatcttcgtcaagaccctcaccggcaagaccatcactcttgaggttgagagctccgacaccatcgacaacgttaaggccaagatccaggataaggaaggcatccccccggaccagcagaggctcatcttcgctggaaagcagctggaggatggccgcacactcgctgactacaacatccaaaaggagtccaccctccacctggtgcttcggctcaggggaggtatgcagatttttgtcaagaccctcacagggaagacaattaccctggaggtcgagagctcagataccatcgacaatgttaaagccaaaattcaggataaggaaggcatcccccctgaccagcagaggcttatctttgttggcaagca

SEQ ID NO: 4227 - DNA, 424 bp, Lilium asiatic
  unsure (1)..(424): unsure at all n locations
  Clone ID: LIB3230-019-P1-K1-G3
nncgacgcgtggggaagagctcgcgacgggggtttcattcctccgtaacctgacacaaggggtcttagacaagagactggaaatgtgggagaagtactgtctacggcattgttttactgttccagatggatttgaattgcctaaagctcaagattctaccagtaatgataatttgcttcatgaaggactttatgatccagagcttgattctcaattggactccctacggaagaaacttgttgcagttgggcaagaatctgcggagttgcaaagtgagatccatgcactggagaagcagtctactctaagcagtaaatttgatgcatctgttgcagatgcggttcaactatatgaggactctgcccatgaaatgtaccaagaaattgggaaattaacatccaatctacagctgaaattccaggct

SEQ ID NO: 4228 - DNA, 415 bp, Lilium asiatic
  Clone ID: LIB3230-019-P1-K1-G5
gcgtgggtggcaaggatgctgttatcttggggcttcgggaagttagggaaggggggactttgtcgtcacagccactagtcgtgcaaaacgaagatgaaatcttttctcgacctaaaagaacttggtttacaactgaaaaagagaagaagcttatagcgaaggctgctaaagattccttggataataaaaatggtcctgagttagtaagtctccagcaagcggtacaactttaaatgaacgaaaaatgacacgtggtgcatgggaaacacctaccacgtgcgaaaacgctaaggttggaagtcattaaggagatgcttgttcaatgaagaggaagacatatatggaacaagaaactgggggagcggataatagagagaaccagccaatcactagtagatcttgctgaccggggagc

SEQ ID NO: 4229 - DNA, 419 bp, Lilium asiatic
  Clone ID: LIB3230-019-P1-K1-G7
cgcaaatttccgattcttctttttattttgataaagaagggacaaaagaacaggaaaaaaaagaggaaaatgatcgaataacaatagcagaaacttgggatagcattctatttgctcaagcaataagaggtttgatgttagtaacacaatcttttcttagaaaatatattgtattaccttcattgataatagctaaaaatatgggccgtatgttattattccaatttcctgaatggtacgaggatttgaaggaatggaatctagaaatgcacattaagtgcacctataatggtgttcaattatcagaaacagaatttccaaaagattggttaacagacggaattcagataaagattttatttcctttttgtctgaaaccttggcgaagacaaagatctaagatacgatctcattatatg

SEQ ID NO: 4230 - DNA, 426 bp, Lilium asiatic
  unsure (1)..(426): unsure at all n locations
  Clone ID: LIB3230-019-P1-K1-G8
aaantccgggatgacccgcaacaggtcggtttgcactcgtgggactccgtgaaggatgagaatggtcactctccatacatgtacgcattgatgaggagtaaccattcttacaataccctagtggctaggaagcttgcggacaggaagagcaggcaactttccattacagtagggaatgtggatatcgatctcgatctccctttcgaagagctgcaaatcacagaagagagagataagccaccgcttcaagtggagtcttgtgctcagtgtgccatggttgaggcaggacgacgtaggcgaggtggacgctcacgcagttttctccagcgctcgtttgtccagtccctcatcgctgttgcagcggtctgtgtctgtgtctgcgtgtttctccgtggcatgccaaagatcaactctatcgcacctttc

SEQ ID NO: 4231 - DNA, 417 bp, Lilium asiatic
  Clone ID: LIB3230-019-P1-K1-G9
cgatgagcttcgcaggtcacctggaactccagtttttactgcaccagaatgttgtttgggcctgacataccacggtagagctgccgatacctgggctgtgggagttaccttgtattacatggtttcgggtcaatatccatttctcggagagacgctgcaggatacctatgataagattgtcaacaacccgctgataattcctgataacgtccacacagagctgaaggacctactggagcagctgctttgcaaagatcctaggcaacgaatcaccttatctggtgtgacgaagcacgcttgggtggttgctgaggatgggccgatccccgaattcttgtgtcggtgtcaacgaaacagctccaaagggttgtaaatattgtgcgacccgacaacactgggttttgttttgtaaatcat

SEQ ID NO: 4232 - DNA, 150 bp, Lilium asiatic
  unsure (1)..(150): unsure at all n locations
  Clone ID: LIB3230-019-P1-K1-H1
tggagggttnnnnagacgcggaggagcgaaaaaaacaaaaaaaatatttattaattaatggacaataaagaggtgaggggaatcaaaagaaatgaatactataaaaaattaaatatatgaaaaaagtaaaaactaaaaaaaattataatt

SEQ ID NO: 4233 - DNA, 415 bp, Lilium asiatic
  unsure (1)..(415): unsure at all n locations
  Clone ID: LIB3230-019-P1-K1-H12
aggacgcgtgggcggacgcgtgggctccaagccaaaacaagatgcaaatcttcgacaagaccctcaccggcaagaccatcactcttgaggttgagagctacgacaccatcgacaacgttaaggccaagatccaggataaggaaggcatacccccggaccagcagaggctcatcttcgctggaaagcaactggaggatggcncaacactcgctgactacaacatccaaaaggagaccaccctccacctggtgcttcggctcacgggaggtatgcagatttttgtcaagaccctcacagggaagacaattaccctggaggtcgagagctcagataccatcgacaatgttaaagccaaaattcaggataaggaaggcataccccctgaccagcagaggcttatcttcgctggcaagca

SEQ ID NO: 4234 - DNA, 428 bp, Lilium asiatic
  unsure (1)..(428): unsure at all n locations
  Clone ID: LIB3230-019-P1-K1-H3
nnnncgacgcgtgggggcggattcgatgtcgaggccaggggtgtcgccgggaagctggattacccttcccccaagatgtcaatctacgccaaaggggtctcagtactgatgcctggttacgatataccaacattcatcgcacatcctgcccctgcaccctgcctgcccgagagaatatcatggccgacacacgaacagaaccagaccggtgcctctgcaccaaattcaagttaaacatctgtgtggcagccttgactcaccctacttcggattctttgctttttgcaagttgagccagctgcgcactgaagcttctcatcctgtacccatttttcttgttcaggcttagtctggtccctcagctatctgtaagatgtccaggggcatcagaggaagaacattagtgaatgtgtacagttttgatgtac

SEQ ID NO: 4235 - DNA, 428 bp, Lilium asiatic
  unsure (1)..(428): unsure at all n locations
  Clone ID: LIB3230-019-P1-K1-H4
ntttccatgtttgcttcagcagatgccaatcgagaagctgtagtatgggatcgtatttctcgagaggtgaaagtaaagaacatgttataccatactgcacgcataaactgcgtggcctggtctcccgataatcgcatggttgccacgggctcactggacacatgtgtgattgtatatgaggtggacaaggcagcatcgacacgcacgactataaaatgtgctcacctaggaggggtgtatggattggtcttcagcgatgagaacagtgtggtgagtgctggggaagatgcatgtgtgcgtgtatggaaactgcagcagtagtactgtttggcaacaaataaacagattgtgtgtgtatgctacagagcttttggttttgcaggttttgagttttggtacctagagctcttgattcggtatgctacaga

SEQ ID NO: 4236 - DNA, 428 bp, Lilium asiatic
  unsure (1)..(428): unsure at all n locations
  Clone ID: LIB3230-019-P1-K1-H5
nntcccgctctccctcctccgcaagcggttatcgatccaagatgaagttcaacatcgcgaatcccaccactgggtgccagaagaagctcgagatcgatgatgactcgaagcttcgggctttttatgacaagcgtatctcccaggaagtcaatggtgatgctctaggagaggagttcaagggatatgttttcaaaatcatgggaggatgtgacaagcaaggcttcccaatgaagcagggtgttcttactcctggccgtgtgagacttctgctacacagaggaactccttgtttccgtggatttggtaggcgcaatggagagcgcaggaggaaatctgttcgtgggtgcattgtcagtcctgacctgtcagtcatcaacttggtcattgtcaagaaaggtgataatgatcttcctggtcttactgatgtt

SEQ ID NO: 4237 - DNA, 425 bp, Lilium asiatic
  Clone ID: LIB3230-019-P1-K1-H6
ttcccgtttttgcttcatcagaagcggattttgattcaagatgaaggtaaacattgggaggagtaggaatgggtgccagaagaagctcccgaactatgatgataagaagctttggcctttttatgacaagtgtatttggtaggaagtcaatgagtatgctatatgagaggagttcaagggatatgcattgaaaaatatggaaggatgtgtataagaaagggttcaccaatgaagcagggtgtggttacttctggacggtgagacttgtgctacacagagtaactactatgattcggggattggataggaactatggatagacgcattatgaaatctgattgtgggtgcatgtgtagttctgacctgaagtccatgtaacttggttattggaaagaaaggtgataatgaatcttgctggtgttact

SEQ ID NO: 4238 - DNA, 419 bp, Lilium asiatic
  Clone ID: LIB3230-019-P1-K1-H9
cccgatatgcctgcaggtccggaaatgcatgggtactatggagatgacggcagaggagctggacaacatgcaattagggacactgattctatcaatgcgtcttatgaccgttttctgcgcaatggcaacccttacggcccgggagaaaatgttagaccattgggtggcatgccaggtcgccctgtagaagatttgcgcatgttgggtgccggtgatggccggaatgtcggagttggaggtggcagaccagaactactccctcctgatgcctcaaacacagtctttgtggaaggactccctgctaattgtacacgcagggaagtgtcccatatatttcgcccttttgtaggttttcgagaggtgagacttgtgaacaaggagtcccggaatcctggaggcgatcctttggttctgtgttt

SEQ ID NO: 4239 - DNA, 427 bp, Lilium asiatic
  Clone ID: LIB3230-020-P1-K1-A1
cccacgcgtccgctttggaggtggtggaagcagccgtggacgcaggcaaaggaggggagaggatgtggttcatcctctcaaggtatctcttgaggacctgtacaatgggacttcgaagaagctctccctttctcgcaatgtcatttgttctaaatgcaagggaaaagggtcaaaatctggtgcttcaatgaaatgtgctgggtgccagggatctggtatgaaggtctcaatccgtcagctaggaccttccatgattcagcagatgcagcacccttgcaatgagtgcaagggcacgggagaaagtatcaatgataaagaccgctgcccgcagtgcaagggtgagaaggttgttcaggaaaagaaagtcttggaggtgcatgttgaaaagggtatgcagaatggccagaagataaccttccctggagag

SEQ ID NO: 4240 - DNA, 365 bp, Lilium asiatic
  Clone ID: LIB3230-020-P1-K1-A10
ggtgtatttgattttttccaaatgggattgtttcaaaatagtttgaattttttaaataaaaatatgattcatgtgttgtctaactaatttattatatttatgacatagtcggacattggattatgatgttactcttggtatccaagtaaataaatgtagaaattgaatccctattttggttagtgaattgttgattatgaagtctctttctgtcctagaaagtgaatgcatgtagttacagtttatggttattagttttgtaaagtttggttataaactgggtctgtggttcgagtcttcgtaaacttctggatatatccttcatttaataatgggaatgtctgtgttcatttttggtcctccct

SEQ ID NO: 4241 - DNA, 413 bp, Lilium asiatic
  Clone ID: LIB3230-020-P1-K1-A5
ccaagtgcaatttttacatcattctgcggaggtgctgaaattggtcaagcaatagctcgtgacacacggatacctctcgtctcgttcacaggaagttctaaggttggactaatggttcaacagacagttagtcagagattcggtaaatgtttgcttgaacttagtggaaataatgctataattgtcatggatgatgccgacatccagcttgctgtccgctctgttctgtttgctgctgttggtacagctggacaacgctgtacaacttgtcgtaggctgcttcttcatgaaaacatctatcaagctgtacttgatcagctaattggtgtctacaaacaagtcaagattgggggcccgttggagaaaggtaccttactgggaccactacacacttcctgcctcgaaggagcact

SEQ ID NO: 4242 - DNA, 414 bp, Lilium asiatic
  Clone ID: LIB3230-020-P1-K1-A6
gggtcatatatccgtgcaactcctaattatacagactgtaatgaaattgtacgaggcacatgagaagtcgttttcaacaagccatcttagtatccttttggatatgctctcatgcattgcgtctcatgcaagcgaagtgaattctgcaacagacctacaacggaagctccagaaagcatgttccctcctcgagatatccgatccaccgattgttcactttgaaaatgaagcgtaccagtcctacatcaggttcatgcaaactcaactcgtggataatccattgatcgtagaagagttggacctagattccaaactggtggctgtttgtgtgaaaatactgcaaatatacttgaaatgcgctggataccaacaaccaaaggaacagcgccaaaatttgcattgggtactacctct

SEQ ID NO: 4243 - DNA, 128 bp, Lilium asiatic
  unsure (1)..(128): unsure at all n locations
  Clone ID: LIB3230-020-P1-K1-A7
gacccacgcgaccgcccacgcgaccgcnacggaggcggaggaagcagccgcggacgcaagcaaaggagggggggggagaagaaacacgcgcaaaaggaacccaccgaggaccagcacaaagggaccac

SEQ ID NO: 4244 - DNA, 399 bp, Lilium asiatic
  Clone ID: LIB3230-020-P1-K1-A9
ggtgtatttgattttttccaaatgggattgtttcaaaatagtttgaattttttaaataaaaatatgattcaagtgttgtctaactaatttattatatttatgacatagttggacattggattatgatgttactcttggtatccaagtaaataaatgtagaaattgaattcctattttggttagtgaattgttgattatgaagtctctttctgtcctagaaagtgaatgcatgtagttacagtttttggttattagttttgtaatggttggttatcaacggggtctgtggttcgagtctcgggaaactactggaaatagcctccatttaataatgggaatgtctgcgtacatttctgtccccccgtaagcctgcacaagcgggaaaaatacgggttatcc

SEQ ID NO: 4245 - DNA, 408 bp, Lilium asiatic
  Clone ID: LIB3230-020-P1-K1-B10
ccctaatattgtgaagttggaagggttgattacttctcgtctatcatctagtatatattttgtattcgagtacatggagcataatcttgcaggactgtcatcttgccctgacattaaattcactgagccacaggtcaaatgctacatgcaccaattactatccagactcgaacattgtcattcacaaggcgtcatacattgtgacatcaaaggagcaaatcttctagttaacaatgaaggcattcttaaaattgctgattttggtctggcaaacttctccaatcctgcgaataagcaacctctgacaagtcgtgttgtgactatgtggtatcatccaccagagcttctacttggctcaacaactatgaagcaactgttgatttgtggagtgtgggttgtgtatttgta

SEQ ID NO: 4246 - DNA, 407 bp, Lilium asiatic
  Clone ID: LIB3230-020-P1-K1-B11
gctttctcttctttggtaacgatgtcttcttgctgtggtggaaagtgtggctgcgggtcttcctgcaagtgtggcagtggatgcaatggatgtggtatgtatcctgacttggctgaggggagcactgcctctaccactatgatcatggggtttgctcctgccaagggggagtttgaggggtttgagatgtatgctgagaatggtggctgtggctgcaagtgtggtgataactgcaactgcaacccctgcaagtgtggcaagtgatctctccatggagaagaggatgtagggtttgataccctttgtttacttgtttctgctgtagtgctgaataatggccatgggtttatatgatgcaagtctttttgcaccatgagtggttgttcaccagtggcttagtgtcttgg

SEQ ID NO: 4247 - DNA, 408 bp, Lilium asiatic
  Clone ID: LIB3230-020-P1-K1-B12
aaaaaatttgaccgaccctcactatgagcttactaactatataaactaaataaccaacttatggcttcgtttcatattgtcgagattccaagaaacagtcactatatgactagatcgatcatatagttgtagcaactgaaattttttcataaaaattttaaatcttattataggttgcgaaacaaaaataaagggatgtggataaatggaaggatgatagtaaagaaagaacacaaagtatccatgatatatgattccaatatgtatggtttatgaattatctcacaaaaggcaatgtgataaagcatcaatactgatataatatcaataatttaaagataacgagcctcgggttaatataaactaagaaaattaactcaggaacaaattttgttggggttccattgc

SEQ ID NO: 4248 - DNA, 411 bp, Lilium asiatic
  Clone ID: LIB3230-020-P1-K1-B5
cgtcgggatcaatcgctcacgacctggaggcgaaccacgacaccctccgcttcggcctcgacggcgtcaagggcgcgatcgtcggcggccaccccgtccagtcgctccgtgaaaccgtatcgaaaaacatagaggagaagaagcggatgatcgccgacctcacctacggctctgccttcaacatccgcagggatctcgaccgccagatcttctccagatttcagaggcctccaggggcagttgcttcttccatgctgggtttagaggccctcactggtgaattggacagctttggcttcgaagattatctcaatgtgccgcaagattcggaaaccttccgtccagcagattcacatcatggaatggaggttcgtcttggcctttccaagggacctgcttcctccaatcttt

SEQ ID NO: 4249 - DNA, 408 bp, Lilium asiatic
  Clone ID: LIB3230-020-P1-K1-B6
agagaaaaatagatggttatgatgattctgggaagacaggttctgttacccccctacggaaatcagttcgcacaatccagcctacttcaaagttgcttgaaggactgcaaacctcttcaagtgtatcgaggattcctagtttttctcatgccaaggcccaaccgaaagctacaccaccaagagggaaagctctgaaagaagggtcccgatgaaggtctgctagggatgactgaagcatgtataggagaaacagttctgggagatgagcttggcattatattctgtttattaattttggactttgccgtcattctgttatcattagatgtgaagttaatcggggttttacctttaaactattgcccctatgggcgttaatatgttatctgtatggttaaagttgtttgt

SEQ ID NO: 4250 - DNA, 419 bp, Lilium asiatic
  Clone ID: LIB3230-020-P1-K1-B7
ggacaagactaccaaggagttgttggctgtgaagtatattgagagggggaagaagattgacgagaatgtgcagagagaaattattaatcaccgagctctgaggcatcccaacattgttcggtttaaagaggtcttgcttacaccaactcacctagcaatcgtcatggaatatgctgctggaggtgagctatttgagaaaatatgcagtgctggccggtttagcgaggatgaggcgagatttttctttcagcagttaatatcaggagtcagttactgccattccgtggagatctgtcaccgtgatcttaaactggagaacacactcttagatggtagtccaacaccacgccttaaaatatgtgacttccgctattcgaagtctggtttattgcattcacaacccaaatcgacagtaggtt

SEQ ID NO: 4251 - DNA, 212 bp, Lilium asiatic
  Clone ID: LIB3230-020-P1-K1-B8
tcttccagttcatgactaccaaggagttgctgtctttgaagcatattgagaggtgcaaggggagtgactagaatgtgcttagagaaattattaatcacctagctatgatgtattccatcaattttcggtctaaagaggatttgcttacaccaactcaccaaacatcacacatttgatattctgcttgaagtgagctttaatagaaaattatt

SEQ ID NO: 4252 - DNA, 419 bp, Lilium asiatic
  Clone ID: LIB3230-020-P1-K1-C1
ggtttagggagaagcggaaggagcggaactttgataagaagatccggtatagcgttcggaaagaggttgctttgaggatgcaacggaacaagggtcagtttacatcatccaaatcaaagcctgaagaaacgactccgggtgaaaccagttgggatgccacccaacagtggggttcagtggatggtcgtcctccagcagcaccagaatgtcatcactgcggcatcaatgctaaatctactccaatgatgcgtcgaggtcccaatgggccaaggaccttatgcaatgcctgtggacttatgtgggctaataagggtacactgagggacctttcgaggactccggccatgattcccattcaaaatgtgttgcctccacaccaaagtacctttccagaatcacagaaggttggggattcaacc

SEQ ID NO: 4253 - DNA, 406 bp, Lilium asiatic
  Clone ID: LIB3230-020-P1-K1-C10
gtccgcctccacttaccggtaggaggcgatcccttggaagatgatggcctgaagagtagtctgatggaaatgtatcatttgttctttaaggaagatgtatctttgaaggtgatgagtgtgtatcagatattttttgaaggggaattttcaagtgacaacggccatggtctccatgcagtagaaattcattgaactctaaagtggaatgttttcatgtgtggaattgccgagagtggagcttgcttttggatactcaaacacttagtgtagctggttgaaaattcaatgatcgtattgaaagtccgtcgataggagaagtgttcttgtatcagtcaaacagcagggatatcgtctggctacttccctctgtaagcaaattgtttcaattcgtttttttatgctctag

SEQ ID NO: 4254 - DNA, 406 bp, Lilium asiatic
  Clone ID: LIB3230-020-P1-K1-C12
caacactaaaaaataaatttccttgagaaaaaaaaggcaaaacatcccttcatagtataaatttacatttcaggcgctaggcatattttatgttatgctcgttcacacaaaatagaggaaattcttgaaattttaaggattcctagaatcctcatgacatacaagaacataaagaaatcgaagtttggcaaaatatttttcatctcaatggttttctattgattcacttctttttgttattgaggcgaactctggatcaggtttgactttgctacatctcctcatccgcctttgaatttggagatgggtcttcactgcaaaagtgcttgaaatgtcgtttatgacctgtacactatacacgatgtattgtgttattttgatgaccacaagcaggtgctctaagtct

SEQ ID NO: 4255 - DNA, 416 bp, Lilium asiatic
  Clone ID: LIB3230-020-P1-K1-C3
ctcgattcagtgccgccgccgccgccgccgccgccgccgccgccgccgccgccgccggcggcgccgctgccgctgccgatgccgatcttcctccgtcgaccggaaaagccgctgaaatggcagctgaagatgttgttgccgaaacccctgcccctgctattggggagcccatggacctcatgaccgcccttcaagtggtcatgaagaaatcactggcccatgatggtcttattcgtgggctccatgagggtgccaaggcaatcgagcagtatgctgcgcagctatgcatgctggctgagagctgtgaccaacctgactatgttaagctggtgaaggcactctgtgctgaccacaacgttcacttgggcactgagcctagcgcttaaagcctttgcgaatgggctgggctctgcaaa

SEQ ID NO: 4256 - DNA, 411 bp, Lilium asiatic
  Clone ID: LIB3230-020-P1-K1-C5
cggacgcgtgggctggcacaggaaaccgatgtcggtgttaaagttgatgataagattggaatgccggagaagcatgctgaacagggagatgttccgacagcggaggtcaaggaggggcaagccaaggaggtagaggagaaagaagaggacaaggagatgactttggaagagtatgagaaagtaagggaggaaaagcgaaaagcactacttgagatgaagactaaagagaggaaggtggattttgataaggactttgaatctatgcaacaactttcactgaagaaagcaaatgctgatgaagttttcatcaaattgggttctgacaaggatgggaaaaagaaggaaaatgcagatcgtgatgaaagagctaaaaaggtgagcatccagcagtttctgaagccctctgatgga

SEQ ID NO: 4257 - DNA, 411 bp, Lilium asiatic
  Clone ID: LIB3230-020-P1-K1-C6
agctgattcagaaagaaaggctcaaagagttggagaagaaacaaaaagctgaggaaggagagaatgcggccgaggcatcggaatccaaggcagaagatgaggaagcaacaattaccctccggccattaaacatggaagacatgaggcaggcaaagaatcaagtttccacaagttttgctgccgagggttcgataatgagtgagctcaaacaatggaacgagctatatggagaaggcggctcgaggaaaaagaaacaattaacttacttcctctaaatatacacttatgtatgtatatacacggttacagttaaatgctcatccccaaatgaacactccagcttgtaatgagggatgaagctgccctgttctcatcaaacgcccgatggagagtgtggggcttacagaccaa

SEQ ID NO: 4258 - DNA, 413 bp, Lilium asiatic
  Clone ID: LIB3230-020-P1-K1-C8
cggacgcgtgggggaggatctcagcagggatgtgataaagtcggattctgcaagcgtggaagttcctgagctggagcttgagcttcaaagtggcacattaggtggaatggtcactacagttgaaggtttgattactcaaataacagagaaaattgggatgctacatggattttccttgggtgatagtcttgatgattggtcaaagcagaagtggcaagatttcaaatcccggcttgctaagcttttaaatctagagcaaccttggaccttgatcatggatgatgcaatggcaagttcctttgtttcacctgcaactgatgacatagaagacgacaagcagctcgttgttgaggagtatgataggacatgggagcaaaatgaggagttggggctaaatgacatggacacatcgt

SEQ ID NO: 4259 - DNA, 412 bp, Lilium asiatic
  Clone ID: LIB3230-020-P1-K1-C9
ctttgcttggtgcaatacaatcattgtttgaaggctcgatgtacacatttgtgttcctctggactcatgcattaagcccaaatgatgaagacattcctcatagttttatttttgctaccttcatattgtcatctatgttgggtatttccattgcatccaggctattggcccgtgcgactgttagagttgaaagttacatgcaaatagtttttggagtctccgccatcactctcgtgcttccgattataaccaattttctcgtagctccttccactgtgaaaggtgggagcatctcattcgggagatgtatccaactctttggcttttgtacctttgaggtttgtgttgggatattctggccgtcaataatgaagatgagatcccagtacattacagaggaggctaggagcac

SEQ ID NO: 4260 - DNA, 417 bp, Lilium asiatic
  Clone ID: LIB3230-020-P1-K1-D1
cggacgcgtgggctcgcgccagccatgggtcgaaggccagcaaggtgctatcgccaaatcaagaacaagccttacccgaagtcccgctactgccgtggtgttccagacccaaagatcaggatctatgatgtcggaatgaagaaaaagggagtcgatgagttccctttctgtgttcaccttgtcagctgggagaaggagaatgtgtcgagtgaggctttggaggctgctcggattgcttgcaacaaatatatgaccaagtttgctgggaaggatgccttccatctacgagtgagggtgcacccattccatgttctgcgtatcaacaagatgctttcgtgtgcaggagctgataggcttcagactggtatgagaggtgccttcgggaagcctttgggaacatgtgcccgggttagcatt

SEQ ID NO: 4261 - DNA, 397 bp, Lilium asiatic
  Clone ID: LIB3230-020-P1-K1-D10
cggacgcgtggggtcgactccatgatcaatgatcacaagcgcctccttctctctctgtatctcatttgttttgttttagaatttgatcctgtgcttacaagtgtctcccccctgcaggagttacgtgatgaacggcgaggattgcgtgcatgaaaggagaccgagaacaaggaggtcaagcaccagtgatggatggctctgatagcagaagcgatggatggctctgatgaagtaaagtacaaggcgcaatgctgatctgacggcgaagaggaaggccgggtatgaagactctagaagcttgtgtgagaggagatcaccattggttgtgcatgcatggtgctcggagaagaagggatgccaggccgaaattcacatctataaagtccctagccgagca

SEQ ID NO: 4262 - DNA, 403 bp, Lilium asiatic
  Clone ID: LIB3230-020-P1-K1-D12
caacactaaaaaataaatttccttgagaaaaaaaaggcaaaacatcccttcatagtataaatttacatttcaggcgctaggcatattttatgttatgctcgttcacacaaaatagaggaaattcttgaaattttaaggattcctagaatcctcatgacatacaagaacataaagaaatcgaagtttggcaaaatatttttcatctcaatggttttctattgattcacttctttttgttattgaggcgaactctggatcaggtttgactttgctacatctcctcatccgcctttgaatttggagatgggtcttcactgcaaaagtgcttgaaatgtcgtttatgacctgtacactatacacgatgtattgtgttattttgatgaccacaagcaggtgctctaag

SEQ ID NO: 4263 - DNA, 417 bp, Lilium asiatic
  Clone ID: LIB3230-020-P1-K1-D2
ctcgcgaagaaggaggcgcttgtggagaagaagaagaaggatcgggagaacaggaagctcatcttcagccgtggccagcagtacgccaaggagtatgcgaatcaggagaaggagctgattcagctgaagcgagaggcgaggctgaaaggggctttctatgttagcccggaggccaagcttcttttcatcattcgcatccgcggtatcaatgccatgcacccaaagacacgcaaaatcctccagcttcttcgtttgcgccagatctttaatggagtttttctcaaggtcaacaaggccactgtgaacatgttgcaccgagttgaaccctacgtcacttttgggtatcccaacttgaagagtgtcagggagttgatctataagagaggttttggcaagcttgataagcaaaggattcct

SEQ ID NO: 4264 - DNA, 415 bp, Lilium asiatic
  Clone ID: LIB3230-020-P1-K1-D3
gttcgacataagaatcttgtccgccttttgggatattgcattgaagggattcacaggatgcttgtgtatgaatatgtgaacaatggaaatttagagcagtggcttcatggagcaatgcgtcaacatggtgttttgagttgggagtcccgcatgaaggttatcctaggcactgcaaaagcgcttgcttatctccatgaagcgatagagccgaaagtcgtacatcgagacataaaatcaagcaacattctacttgaccatgaatttaacagcaaggtttctgattttggtttggccaagctcttgggttccggaaagagccatattgcgactagagtaatgggaacgttcgggtacgtggcacctgagtatgcaaatactggattgttaaatgagaagagtgatgtttttagctttg

SEQ ID NO: 4265 - DNA, 412 bp, Lilium asiatic
  Clone ID: LIB3230-020-P1-K1-D4
atcccctctcaaatccctctgatggcgccaaaatccgagaagaagcccgccgagaagaagccggtggcggagaagcctgccgccgaggaggagaagaagtcagccccggcagcggcaccggcggagaagaagcccaaggctgggaagaaggtcccggcctccaaggagggcgagaagaagaagaagaggtcgaagaagtcggtggagacctacaagatctacatattcaaggtgttgaagcaggtccaccccgacatcgggatctccagcaaggccatggggatcatgaacagcttcattaacgacctcttcgagaagatggctcgggagtctgctcgtctcgcccgctacaacaagaagaataccatcacctcccgggagatccagacctctgtccgcctcgtcctccccg

SEQ ID NO: 4266 - DNA, 384 bp, Lilium asiatic
  Clone ID: LIB3230-020-P1-K1-D5
aaattggttgaactggtgtgtaattgtcctcctaatggagttgtggagttgtggagttttggagagtaatttggagttatgtaattgtgtattggtatcgtcattagctagtggttcaatctatgagttgttggatgcagtccaggagatttgtgctctcactcgggatctgagatttgtgcaatgacctgttagagtatatgtcagtttcaatattctctcttaataagagctcgtgaaggttagatccttgcatcagctggctttgttctgtcaggattgaacagatcatcatgatctgtacaactgttcctctcacatgcacgaaagctagattgtcccatcagcttgcaacttttgggattggaagagatttcaccattc

SEQ ID NO: 4267 - DNA, 415 bp, Lilium asiatic
  Clone ID: LIB3230-020-P1-K1-E2
aggtgaaccaaagtttgatgaagcaaagagcgttgactctaaactgtcatgggagttcgctgtgaatggagaaatgtaatctgaaccatacgtggcatctcttggagcttctgaagggaaataaggcacttcatagttgttgagcatgatgggcgagatcagtttaagacgaggctcgtagtataaagctacgagcaaagtgtaggctgaatttcctcaagtattctctcccattgtgaagatttctactatccgtgtggttctgtgtattgtggcaagtgaatatttgcatatagagcaaatggacatgaagacgatgtttcttcatggtgacttcgaagaggagatatacatgtattagccagaaggatatgtcagagccgacaatgaggacttggtgtacaaattgagaaag

SEQ ID NO: 4268 - DNA, 411 bp, Lilium asiatic
  Clone ID: LIB3230-020-P1-K1-E3
ccaacttcagtaatgtcgccatagacgaagatcagattgccgcaaaccttgtcaagcatggcccacttgcaattggcatcaatgctgtcttcatgcagacatacattgggggtgtatcatgcccatacatttgcggtaggcatttggatcatggagtgcttctggtgggctatggctcagctggatacgcaccgatccgtctcaaggaaaagccatactggatcatcaagaactcttggggtgaaacctggggtgagaagggctactacaagatctgcaggggtcgcaatgtttgtggggttgactccatggtctccactgtggctgccgtccatagctcacactagattgactagatttactgttccagtgcctgttaccatgttactgtaggcctggtgcattaattat

SEQ ID NO: 4269 - DNA, 410 bp, Lilium asiatic
  Clone ID: LIB3230-020-P1-K1-E4
tttaagatacattttcatgaccgccaaggagatttctactgttggttgaatacaacaatgacggaaaacaggaagaccttgaccactaatgatcttgatggttttgacaagaggaaattaccatcacccggattccaagtcgaggtagtgctcgcagactacgatggtaccaattctttaacacctactggtgtaaacgccaccaaagctagtgaggcctccgcctcggctgttactgccaaagaagttagcacgcctaccatcccacctaaggactcggaaagtcaagacaaggatgacgttttctcggacaatgaaacagatgaaagtggatcttcgaagagtaggcgtgctcaggcatctggcaatgcaggacctcctgacactgctaaaggatctgaatctaagct

SEQ ID NO: 4270 - DNA, 407 bp, Lilium asiatic
  Clone ID: LIB3230-020-P1-K1-F11
gcctacttgaaatggagcgcaatggggtccttgctctgcttccagtggcgttcacagttgtggccatctttgccatcagcaccattgccactgcagagcagttgcgcagccaacaggacgacaactacgtaggaatcaacaaggggatccagccgtgctgtaaccagtgtggtttctgcacgaagtcctatcctccactgtgcacctgccatgatgagaatcatatctgcccatcctggtgcaagaactgcatgatgtcgccgaagttgatctatccgccgctatacatttgtcaggatctcattgtcaactactgcgatcacaactgtggcttgggaggcggagctgccacatctgagtaactagctgcgactatacgcagcagtttggccggtgaccatatggat

SEQ ID NO: 4271 - DNA, 411 bp, Lilium asiatic
  Clone ID: LIB3230-020-P1-K1-G1
atttgttcaaacttctgcttattggagattcaggtgttggcaaatcgtgtctactcctgagatttgcggatgattcatacctggaaagctatatcagcaccattggagttgattttaaaatacgcacggttgagcaggatgggaagactatcaaacttcaaatttgggatactgctgggcaagaacgctttaggacgatcacaagcagctattatcgaggggcccatgggattatagttgtttatgatgtcacagaccaggagagcttcaataatgtcaaacaatggttgaatgagattgatcgttacgcaagtgagaatgtaaacaagcttctggttgggaacaagtgtgatcttactgctaacaaagtcgtatcctacgagacaggaaaggcatttgctgatgaaattg

SEQ ID NO: 4272 - DNA, 406 bp, Lilium asiatic
  Clone ID: LIB3230-020-P1-K1-G11
cggacgcgtgggtgttttttcaaggaaaactaaatattctatcagtgattttgcgggatacacagtaatgtgaaaaaaaaaaagtgtctggtgtcatgtgccagaggaagtgatctacgagactacaactgtaatgtcatcgagcttgccgacgaagtatctgtaccctgcttcctgagcagcaggcgaaaatggcgtctgccggtttctatccattggtctctggcgagccagagctgctattttttgagctgtgacctgagggaccatacccgccctgatcgtttgtacgacaatagttgtaacgtaattgcggtacaagttgctgtagagtccgtgggctcctgcaacgatgacatcaccagatgcaaccggtaaagtaaacacctgggcagcgctaggaaga

SEQ ID NO: 4273 - DNA, 398 bp, Lilium asiatic
  Clone ID: LIB3230-020-P1-K1-G12
cggacgcgtggtcggacgcgtgggcggactcttgggctggaagcaagcgtccggggggtctattgttagattcaccccaaactgacttgagtggttatcctcgttctcgtctggaaagctcttttccagtcacaacaagctcaagctatgcagcactgttccatgagttgcctggctcatccttgttgtattagcagctctatggtgctggctatggatctgtgtctccttaccagtcaagcaccttttagagggggggacaaagctgatcttatttcagtggaaactatcactattgatctacattgtgcttcaccttacatacaattgtgtttactgagcagacagttaactgtggtttcgaatgatagcttttgtcacttagagctttggatcaa

SEQ ID NO: 4274 - DNA, 408 bp, Lilium asiatic
  Clone ID: LIB3230-020-P1-K1-G5
gcaaagcgtgtaggctccggagctcctgtctaccttgccgccgtgctcgagtaccttgctgctgaggtgctggagctggctggcaatgctgccaaggacaacaagaagtctcggatcatcccgaggcacgtctgccttgctgtcaggaacgaccaggagctgggcaagctgctcgctggagtcaccatctcccatggcggtgtcatccccaacatcaacccggttctcctccccaagaagactcttgagaagggtgattctgctgcaacaaaatctcccaagaagacccccaagtctcccaagaaagctcccaaaacccccaagaaggcgttgtaagatcagctaggtcctgaatttgaattagagctttttgattgtaaaattgagaaggggtgttaatggttttct

SEQ ID NO: 4275 - DNA, 409 bp, Lilium asiatic
  Clone ID: LIB3230-020-P1-K1-G7
cgacagttgataccttgaagcaacaatatttatttgttcctgctatgcacaaggactgttatctcgtatatattctgactgagatgtctggaagcacatcaatggttttcactcgtacatgtgaatctacaaggcttctagctcttattcttcgaaatctaggtttaaaagctataccaattagtggtcaaatgacccaggcaaagagattgggagccttgaatctttttaaggctggagactctaatattcttgtatgtactgatgtggctagtagaggtcttgatattcctgaggtggatatggttatcaactatgacattccttccaattcaaaggattacatccaccgtgtgggcagaactgcacgggctggacggtctggtgttgcaatctcgttagtgaatca

SEQ ID NO: 4276 - DNA, 413 bp, Lilium asiatic
  Clone ID: LIB3230-020-P1-K1-H1
ttcaatcaatcccctcaatcatcgtctctcgctctcagcaatggccggacgtggcaaggcggtcggctccgcagcggcgaagaaggcgacctcgaggagcagcaaggccggtctccagttcccggtcggccgtatcgcccgcttcctcaaggccggcaagtacgccgagagggtcggcgccggcgctccggtctatctcgccgccgtcctggagtatctcgcagccgaggttttggagttggctgggaatgcggcgagggataacaagaagactaggattgtaccgaggcatattcagcttgctgtgaggaatgatgaggagctttcgaagttgctggggatggtgactattgctaatggtggggtgatgccgaacatccacaaccttcttctgcccaagaaggctggttcgt

SEQ ID NO: 4277 - DNA, 394 bp, Lilium asiatic
  Clone ID: LIB3230-020-P1-K1-H4
cggacgcgtgggttttttttcaaggaaaactaaatattctatcagtaattttacggcaaacacagtaaagtaaaaaaaaaaaagtgtctggtctcatgtgccagaggaagtgatatacgagactacaactgtaatgtcatcgagcttgccgccgaagtatctgtaccctgcttcctgagcagcagtcgaaaatggtgtctgccggttcctatccagtgctctctggcgagccagagctgctattttctgagctgtcacctgagggcccatccccgccctgatcgcttgaacgacaatagtagtaacgtcgttgtggtacaagttgtcgtagagtccgtcggttcctgcaacgatgacatcaccagatgcaaccgggaaaggtaacaccttggca

SEQ ID NO: 4278 - DNA, 410 bp, Lilium asiatic
  Clone ID: LIB3230-020-P1-K1-H6
cggacgcgtgggcggacgcgtgggcggacgcgtgggctggaagcaagcgtccgtactctctattggaagatgcaccccaaactgacttgagaggttatcctcgttctcgtctggaaagctcttttccagtcacaacaagctcaagctatgcagcactgtcccatgagttgcctggctcatccttgtcgtatcagcagcgctatggtgctggctatggatctgggtctccttaccagtcaagcacctttcagagggggggacaaagcggttcttcgtacaggggaaactatcattattgatctacattgtgcttcaccttacatacaatgtggttccggcgcagacagtcaactgtgggttcgaatgagagcttttgtcagttagagctatggatcaattttaccattttg

SEQ ID NO: 4279 - DNA, 410 bp, Lilium asiatic
  Clone ID: LIB3230-020-P1-K1-H7
tacaaggggatggcttaattttatccacaacatctggaagcactgcatactcattagcagctggaggatcaatggtccatccacaggttcctggtatcctattcacaccaatctgcccacactctctatcattccgccctctgatattgccagagtacgttacgttgcgggtgcaagtaccgttcaacagcagagggaatgcctgggcatcgttcgatggcaaagacaggaaacagttggctgcgggtgatgccctcatctgcagtatggccccttggccggttccgacagcttgccaagtggactccactcatgatttcctgcgcagcattcacgaaggcctccattggaatctgaggaagagccagtcgtatgatggcccccgtgatgcatagaccagactgtgtcgt

SEQ ID NO: 4280 - DNA, 407 bp, Lilium asiatic
  Clone ID: LIB3230-020-P1-K1-H8
cactcactccccttttatgtatcacatgtccaaggaatttaccagatgacaccccgaacagacatctgtcgggttgagcttgagccggtattgcctcaacctgcaaaaagttaactcgatatttgtaatgtagtcttcttctcgtatactgttgatcaggaggttgtccatgtatgcctccattattaggttgaggagcccgtggaagaccttgtttatcagtctttggaaagtagcttttgtgtttttctgaccaaagggcatgacaatgtagcagtacagtccctttggcatgaagaagctcgtgtgttcattttttttttctagcttaatctcattatagctggaacaggcgtctaagaatgacgtccttttaatacgctgtcattgagtctactagttaggct

SEQ ID NO: 4281 - DNA, 417 bp, Lilium asiatic
  Clone ID: LIB3230-021-P1-K1-A1
cggacgcgtggggtcgcagactgtgctagagcgggcgatcgagagaggagcagcgccgtcggatccagactgtgctagagcgggcgatcgagagaggagcagcgccgtcggatccagcgtgctgcggcggtcggcggttctccgattatcgcaaaggagcatattgaatttaaggaatcatggatgatgtaatagatttaactggtgatggaggtgtgctcaagacgattgtcaggaaagccaaaactgatgcacttggaccaacagaaaaccttccacttgttgatgttcattatgaaggcacccttgcggaaaccggtgaagtcttcgacaccactcatgaagataatagcattttctctttcgaggttgggacaggctctgtgatcaaagcctgggatgtagccttacgaacta

SEQ ID NO: 4282 - DNA, 238 bp, Lilium asiatic
  Clone ID: LIB3230-021-P1-K1-A10
ggtgggtagacacgtcaacctctgcttgaatgccctcgaatatgcatagctcacatggagagctttgactgaacagatactggcattgatgtatgctgatcagcctcaatttgtgtaggcgcggatcggccgacggcactagtgcatggagctgaccctacgcatgagagcctgttctacatggtataactacataagccttcaccaacagtaagataaggacacatcaactgcttgt

SEQ ID NO: 4283 - DNA, 374 bp, Lilium asiatic
  Clone ID: LIB3230-021-P1-K1-A11
ggtgtattcacaagtcaaccacttctttaatgccctgtatcatctatagctgggagggctaacttttgacttagacacttacttgcattgatgtattctcatcatcctcaatttgtcttgcgcaggatcggcctactgcacaagtgcatggagctgggcctacgcatgagagcgtgttcatacttgctatttaaacatatgccatcaccaacagtaagttattgacacattctactgcttgtgtcttccctccatctgtcaatttctggcctgaggatatagtttatgttttgcatgatagccatgcaagtgtcatatctactagaagtgatgataatgtaaatatttgctatagtcatggggcatttgctgga

SEQ ID NO: 4284 - DNA, 154 bp, Lilium asiatic
  Clone ID: LIB3230-021-P1-K1-A12
gctcagagagctagtgagccagcgctcttcttgcacggaacaggtatggaaggcactttgaacatttgacttaacagctgcttggaaagctgtcagactccaaccctcattttgtcgtgcgcccgacaagcctaccacaccagtgagcggatca

SEQ ID NO: 4285 - DNA, 434 bp, Lilium asiatic
  Clone ID: LIB3230-021-P1-K1-A2
agacgatccagacacatcatcatctgagagccatggccactactccgcaaagaaaaccgacaaaatctgggcaagaggccattggagacccgccgaggacaccaagctcaaagagttggtatgcctctacggcccacagaactggaacctcattgccgagaagctggggggaagatcagggaaaagctgtaggctgaggtggttcaaccagctggatccaaggataaacaagaaagctttcagtgaggaagaggaggacaagctaatggctgctcacaaactgtatgggaacaaatgggctatgattgctaagctttttccaggaaggaccgacaactcagtgaagaaccactggcatgtgatcatggcaaggaagtatcgtgagcagtcgaatgtttacagaaggatgaagcttggccaagaaattatccata

SEQ ID NO: 4286 - DNA, 428 bp, Lilium asiatic
  Clone ID: LIB3230-021-P1-K1-A7
cggacgcgtgggtgatgatattgcagcggttgctcttgctctccgtttggatgggttgataatatcgaacactactgttcaacgaccagatcctgtaagcagtcacccattggcttccgaagcaggtggtttaagtggaaagccactgtatgatatgtcgacaaatgtgctcagagatatgtatctcctcacacggggacgggttccccttatagggtgtggaggagtgagcagtggtgaagatgcatacagaaagattcgagctggtgcaacccttgttcagctttacacagcttttgcctatggtggaccagcactaattcctcaaatgaaggctgagttggcagagtgcttggaaagggatggtttcaaatctgtccaagaagcaattggtgcagaatgcagataagagatggtatggaaggcat

SEQ ID NO: 4287 - DNA, 404 bp, Lilium asiatic
  Clone ID: LIB3230-021-P1-K1-A8
cggacgcgtgggcggacgcgtgggcggacgcgtgggtgatattggagttgttagcatccaccatgttgggttgctatgtcaaaatcttgagaggtcgcttgatttctaccagaaccttctaggtcttgagataaatgaggcgaggccaaatgataagcttccgtacagaggtgtgtggctgtgggtcggtaatgagatgatccatctgatggagctttcaaatcctgatccgctgacagggcgccctgaacatgggggtctagatcgtcatgcctgtattgcaatcccagatgtgtcccacctcaaagaaatatttgataaagctggaatcaggtgcaccctcagtcgctcatggagggcagcaatctttgcaagagaccctgatgaaaatgcattggaattca

SEQ ID NO: 4288 - DNA, 203 bp, Lilium asiatic
  Clone ID: LIB3230-021-P1-K1-B10
ctctccacttggtgctccgcctcagaggagagtagcctacttttgatagctctcgggcagaaatgtgacttcatccgaaagttgcattgctgtattacatttgactatgttaatgcggagagctagctcacttgtccggacccttgtaccaacatgggcatatgtatgagagctagtaattcttggagtgacgaacaattgct

SEQ ID NO: 4289 - DNA, 420 bp, Lilium asiatic
  Clone ID: LIB3230-021-P1-K1-B11
gcacagttctcaaatccttcaaccatcttcttcatcgaaacaagaaggtggattttattgaacaattcaatgaaaagctccttgtcaaacaggaagatgagaatctccagatttttgatgttcggaacaatcaactaacaggagtaagccgaacagagtttatgactccttcggcattcatctttctatatgagaatcagctgtttttaacattccgaaatcacacagtggctgtttggaacttcagaggtgaactcgttacctctttcgaggatcacttgttgtggcaccctgatagcaatacaaacaacatctatatcacaagtgatcaggaccttataatttcctactgcaaagctgattctgatgattcaacagaagacagtgcagctggatcgattaacatcagcaacatcttga

SEQ ID NO: 4290 - DNA, 422 bp, Lilium asiatic
  Clone ID: LIB3230-021-P1-K1-B12
gttgagagagagagagagagagagcgctccgagcatggcgagggtcctgaaggcgctgcacctcccgatttcctcagcggtgaggagaggggccggcctccacccaaagttctgccgcacgatcatcaaagtctaccaggccaatcagcatctcatcacaaacttggaaaggcgcatttatgatcagtcagctagtattgcgatcccacctctgaatgaagagaaagttgttcaagctgcatctgattttattggcgaactctttgtcctttcggttgctggaggtgttctgatctgcagcagacaaaaaagggccaggttggaagctagaaagaaggaaatatacaagcaggagtctgaggctcgcaagcagaaaaacgatgacatggctcgcaaagtggaggagcataaggaacgattgg

SEQ ID NO: 4291 - DNA, 433 bp, Lilium asiatic
  Clone ID: LIB3230-021-P1-K1-B2
atgatatactgatagagaaactcaatgcagtggaaaagaaaattgaggagaagctcgctatcctcgatcatactttcggaaagaagggccgagctctagaagaagaaattagagatcttgtagaggaaagaaattctttgtcagagaagaaaaggagacctctctatcggaaggggtttgacgtgaaagtggtcgatgttaacaggacatgtaaagtaacaaagggcggccaagtggtgaagtacagtgcattgttagctactggaaactatcacggagttgtgggctttgctagagctaaaggcccaacagctaaggttgctattcaaagggcatatgagaaatgcttccaaaaccttcactatgtggatcgatatgaagatcacaccattgctcatgctattcaaatgaaatatgagaaaaccaagatata

SEQ ID NO: 4292 - DNA, 274 bp, Lilium asiatic
  Clone ID: LIB3230-021-P1-K1-B4
aaacaaaaaacaaaaaaaaaaaaaaaaaaaaaaaaaaaaaaaaaaaaaaggaaaaaaaaaaaaaaaaaaaaaaaaaaaaaaaaaaaaaaaaaaaaaaaaaaaaaaaaaaaaaaaaaaaaaaaaaaaaaaaaaaaaaaaaaaaaaaaaaaaaaaaaaaaaaaaaaaaaaaaaaaaaaaaaaaaaaaaaaaaaaaaaaaacaaaaaaaaaaaaaaaaaaaaaaaaaaaaaaaaaaaaaaaaaaaaaaacaaaaaaaaaaaaaaaaaaaaaaaaaaa

SEQ ID NO: 4293 - DNA, 424 bp, Lilium asiatic
  Clone ID: LIB3230-021-P1-K1-B5
attgagaaattcagcaaaagaaccgtgaaggttaccaagcagcacaatgatgactgcaagcgactactaagactgatgggtgtgcctgtagttgaggcaccttctgaagcagaagcacagtgtgcagcactttgcaaaaatgaccaggtatatgccgtggcctcggaagatatggattcactaacatttggagccccaagatttcttcgtcatttaatggatccaagctcaaagaaaattcccgtaatggaatttgatgtctcgaaggtcttggaggaattagaacttaccatggatcaatttatcgacttgtgcatcctttgtggttgtgattactgtgacagcataaaaggtattggcgcgcagactgcattgaaactcatccgccaacatggttctattgaaagtatgttggagaacataa

SEQ ID NO: 4294 - DNA, 397 bp, Lilium asiatic
  Clone ID: LIB3230-021-P1-K1-B7
cccatcctcaattctctcagatctctcactaatggcgcccaaggccgagaagaagcccgcggcggagaagaagccggccgtcgaggaggagaagaaggcggttccggcggagaagaagcctgctgagaagaagccgagggccgggaagaaggtcccggcctccaaggagggggcctctgacaagaagaagaagaggtcgaagaagtcggtggagacctacaagatctacatcttcaaggtgttgaagcaggtccaccctgacatcgggatctccagcaaggcaatggggatcatgaacagcttcatcaatgatctctttgagaagatggctcaggagtccgcccgccttgctcgctacaacaagaagaacaccatcacctctcgggagattcagact

SEQ ID NO: 4295 - DNA, 349 bp, Lilium asiatic
  Clone ID: LIB3230-021-P1-K1-B8
ctgggatttaccggtcatactcgtctgcgagaacaatcactatgggatgggcactgcggaatggcgggctgctaagagtcctgcatattacaaacgtggggattatgttcccggtctcaaggttgatggaatggacgctcttgctgtgaagcaagcttgcaagtttgccaaggagcatgttctgaagaatggacctattatacttgaaatggatacttatagatatcatggccactcaatgtctgatcctggtagcacttatcgtacccgtgatgaaatttctggtgtgagacaggaacgtgatccgatcgaaagaattaggaaagtggtactatcacatgagctagca

SEQ ID NO: 4296 - DNA, 446 bp, Lilium asiatic
  unsure (1)..(446): unsure at all n locations
  Clone ID: LIB3230-021-P1-K1-B9
aagcagcagctcgccgtcgccggtagcaagaagtgctcnttcgtcgcgcgccacgcgacacgcaaacacacatgtggtcgtgatgcatacgtcgcgcgcaaggagagatctcttcatcaggcgcctgcacgtacaaagcggacgcgcgcctagttggcttgaagaccctccacatccggcaagtcgagcgactccatctgcaagtgtcgcgaaaaaggcggctcgctccgtctcagatcaggcgtcatcacttcgtgacctcccacggcattgcacaggtgaagagcgtcacaggcagcaagattctgcgtatcctcaaggctcacgggctggcgccggagatcccggaggatttgtattatctgatcaagaaggcggtggcgatccggaagcacttggagcgcaatacgaaggataaggattctaagttccggcttatgctggtt

SEQ ID NO: 4297 - DNA, 417 bp, Lilium asiatic
  Clone ID: LIB3230-021-P1-K1-C11
ggtagattgactcttggacctgtacttgtttcgcctgatttatgcataaatcttatttctgtctttgccttagcccttgctggcattgatatgttcttctcagcctctatttgtgttgcgcaggatcggcggacgggacaggtgcatggagctggccctaggcatgagagcttgtactacatggagtttctacatattcctccaccagcagttgttttggtcacatctacttcttctgtcaaccatacaactgccaatttgtggcataggcggttaggtcatgttttgtttggtcgtcttgcaagtcttatatctactggagttcttggtaatgtgtcttctcgtttgagtcatgagtcatgttctggatgttaggttggctaagtttactgctcagcctttctcctccagtgagtc

SEQ ID NO: 4298 - DNA, 420 bp, Lilium asiatic
  Clone ID: LIB3230-021-P1-K1-C12
cggacgcgtgggcggaattctagggtttcgcttcccggcgccccaatccgagagaggaggttttctagctattgaggtgtgtgtagccacaatgaagcccattttctgtggcaactttgagtatgatgctcgccagtctgagcttgaaagacttttcaaaagatatgggaaggttgacagggtagatatgaagtcaggatttgcctttgtctacatggaggatgagcgggatgctgaggatgcaattcgaggacttgacaggacagattttgggaggcgtcgacttcgtgttgagtggaccaagcaagaccgaggtggtaggcagtctggtagttcaagaaggtcttcgacaaacacgaggcccacgaagaccttgtttgtcataaactttgaccaagctaataccaggcctagtgattt

SEQ ID NO: 4299 - DNA, 431 bp, Lilium asiatic
  Clone ID: LIB3230-021-P1-K1-C3
tcaaactcaactcagaaatcgtctcctttgagaaattcaaacaccccttccattctcggccagtccaacatggcgcctgcgccgaatggtagctccaaacagcagcaacaactacattctcagcagcaacatcagcagatgcagaagcagcaagcgatccctcaagcacagttcttcttctccaatgcatacatgccagcccaagcatcccactctaacgccgcagcggctgctgggttttaccatcaaagccgtcagtccgaaccaccccaacagcaggctcagcagaattcatcccccgcagcatctgagcaaccaaaggccgcagccggtggcaataccaaggctgctaccacacccggcatgctacagcaccaggcgcagtttgcagccatggcccagtctggctcggcccctcctcacactctaat

SEQ ID NO: 4300 - DNA, 400 bp, Lilium asiatic
  Clone ID: LIB3230-021-P1-K1-C5
aaatcagccgtcccaaccccccaagatctcgcctttcatcacaaagaccccgagaccgaagcagaaaagtgtaaaacatggagatgagctgctcaaggctattgggatacatcagcacgagaacggaggcagtaaggatggtgcgacgcagagactattgagcaggcggcacggcgaagaagggtggcaaaggtggtggaggcgatggccctaaatctcatggtatcagagcagagctaacgaaaaccacggtgttcggcgccaatatcctcaaggacggcacagatcccaagatatggcctgagtcagagtaccctgactggctttggcacttgcttgacaagcgccctccattgagcgaacttcggcggaagaccgctgattctctttcttacgaaga

SEQ ID NO: 4301 - DNA, 274 bp, Lilium asiatic
  Clone ID: LIB3230-021-P1-K1-C6
gtaggattgctgctgatgacggcaaggtcggctaggtggctgaggccggccacggagagggtgagcacaaggccggcgaggtggttgaggccggccacggagattccgagctcatctcccagatgtgatgttttggttggttttgatctattattagtacttcgaatgatgaactatgagaaggtttatcttatgtgtggtgattaatgtaggcaatatttgtctctttacctattattaataaaatgtgaatatgctagttttggtttgtgat

SEQ ID NO: 4302 - DNA, 425 bp, Lilium asiatic
  Clone ID: LIB3230-021-P1-K1-C7
ggtgaagctgcatctgtagaggagaaacaagaaactggtagcaaccgccgtaaatctgcaaaggcggcaaagaaagaagcaaagaagaatgcaaaaaaagcagctgctgctgctgctgctgctgaaaagagtgttccaactccaaggtcgttagaggggcccgatttatcggagtctgaccaggaaaacagcgacgagtttgtgcttgctgcttctgctgctcctaatttgccggacgacactgagaatgtcgggaggtttctctacttggaaggagtagagtacatcatgtggtgcacgtatgatgtacatttttacgcatcctttgccttgttagatctattccccaaaatcgagttgaacatacaaagggactttgcgagggccgtcctatgtgaggatagaagaaaaataaagtttctggc

SEQ ID NO: 4303 - DNA, 411 bp, Lilium asiatic
  Clone ID: LIB3230-021-P1-K1-D10
ggtcgattgactaatgaacctgtactcgtctagcctgattcatgcataaagggagagggccgtcttttttttaaaccttaccgccattgatatgttctgatcatcctctatttgcgtagcgcaggaccggcggacgggacaagtgcatggagcaggccctaggcatgagagcttgtactacatggcgtatttacatattccttcaccagcagaggtttaggtcacatctacttctcctgacaaccatacaactgccaatttctggcatacgcggctaggacatgtgcaggttggtcgtcttgcaagccttatatatactggaagtgacggtaatgggacgtctggatagaccaatgcagaatgttctactatcataagaacgataagcagactgctcaaactatatcctcc

SEQ ID NO: 4304 - DNA, 407 bp, Lilium asiatic
  Clone ID: LIB3230-021-P1-K1-D11
ggtagattgactcttggacctgtacttgtttcgcctgatttatgcataaagggtgggtctgtcttttttttatcccttgctggcattgatatgttcttctcagcctctatttgtgttgcgcaggatcggcggacgggacaggtgcatggagctggccctaggcatgagagcttgtactacatggagtatctacatattcctccaccagcagttgttttggtcacatctacttcttctgtcaaccatacaactgccaatttgtggcatacgcggctcggtcatgtttcgtttggtcgtcttgcaagtcttatatctactggagttcttggtaatgtgactactcgtttgagtcatgagtcatgttctggatgatcgttggctaagcttacttgctcagcctttctcct

SEQ ID NO: 4305 - DNA, 422 bp, Lilium asiatic
  Clone ID: LIB3230-021-P1-K1-D12
acaaattatctcatttaaataatgtttcagatatactaataccctatcctatccattttgaaattttggttcaaatccttcaatgctggattcaagatgttccctctttacatttattgcgattctttctacataaatatcagaatctgaataaaactattcagagtaataaaactatttatgttttttcaaaagaaaataaaagactattttggttcttgtacaattcttatgtatctgaatgtgaatttttattagttttttttcataaacaatcctgttatttacgatcaacatcttttggagcctttcttgaacgttcacatttctatggaaaaatggaacatattataatagtgtgttgtaataattttcataagaccctgtggcccatcaaggatcctttgatacattatgttcga

SEQ ID NO: 4306 - DNA, 418 bp, Lilium asiatic
  Clone ID: LIB3230-021-P1-K1-D2
gtcgaaggaagccccctcctgggcctttgtcacgctacggacgacttgcctcgtcattctatgaagaggacaacctccgctaccgaagctttcttatggacttcacgcaccctaggccaccaggttccagagacatacaaactgctaggagtggcgatcacgcagttgctaatccatggcacaggaacatggatgtttctcatggagcagttccagtacatgcggctcactcgtacatgcagagtccggctgcctcagcggatattccacaaggtcattgtgttgcaggggtctccgactccagttgtgctctctctcttctgtcaattcagccatgggatgcagctgcgtccagaaaccgagctccaccgctctcggttagtaaccagtttgatttctccccgttggctcaacctac

SEQ ID NO: 4307 - DNA, 424 bp, Lilium asiatic
  Clone ID: LIB3230-021-P1-K1-D3
cccacgcgtccgctcactgcatcactatgatggaagctgtgaatgacgggaaagatcttcatgtctctgtgaccatgccatctattgaggttggtacagttgggggtgggacccagctggcatctcagtctgcttgcttggacctcctcggtgtgaagggtgcaagcatggagtcgcctggagccaatgcaaggctcctggccactatcatagctggtgccgttttagctggggagctctctctcatgtccgccctcgcggccggtcagcttgtgaggagccacatgaagtataacagatccagcaaagatatgtctaaggctgtctcttgagatgctctctcgtcgccaacgttgataatttaatttgtttgttgtttgttacggtgaactcgaggaagtggtaataatggattatgtaagtc

SEQ ID NO: 4308 - DNA, 272 bp, Lilium asiatic
  Clone ID: LIB3230-021-P1-K1-D6
gtaggattgctgctgatgacggcaaggtcggcgaggtggctgaggccggccacggagattctgagcacaaggccggcgaggtggttgaggccggccacggagattccgagctcatctcccagatgtgatgttttggttggttttgatctattattagtacttcgaatgatgaactatgagaaggtttatcttatgtgtggtgattaatgtaggcaatatctgcctcttcacctattattaataaaatgtgaatatcctagttttggcttgtt

SEQ ID NO: 4309 - DNA, 403 bp, Lilium asiatic
  Clone ID: LIB3230-021-P1-K1-D7
gtgctactgttatagaaagttttcttcaccactttggcatgtttggaatgcatgttgatcctggactcccaattggtcagattgcttctagaccaggtcctctttttgccgcatctggacgcttcacagcgactattaaaggaaaaggtgggcatgcagcatccccacacgacgctattgatcctgttattgcagcatccactgcaatcctcagtctccagcagcttgtatctcgggaatctgatccacttgatagcaaagtggtatcagttggatatataaaagctggagaagcacataatgttatccccgaatccgtgacatttggaggcactttcaggagtgtgaccacagaaagccttctccatcttgcaaaacggatcaaagaggtcatagagacaca

SEQ ID NO: 4310 - DNA, 155 bp, Lilium asiatic
  Clone ID: LIB3230-021-P1-K1-D8
gatccacctatcaaccatcctcttacatactatcctcttgcccagaaacgccgaggtgacccttctgttttttacacacaacacaattgctattctctaaacatcttccctacattgtaaaccttccccatttattacctacaatcttatggatc

SEQ ID NO: 4311 - DNA, 423 bp, Lilium asiatic
  Clone ID: LIB3230-021-P1-K1-D9
gttccccctttcaaccatgtccgtacatcccatcctcttcccccgcaacgccaacctcacccttctgtttccccaactaaacacattttctattctctaaacatctccccttcattcaatccttccccatttatcacctgtaatcttttggttcaggtttgcgccatctcggcaatcctggagaaaccgcctagggtttcgcctgcgagatgagctgtttttcttgtttttcatccaacgagaggaagtcatcgaaaaggtacgacacaacttctccagcacctgtgcccgcgcccacgccaacagtctattataatcggaacagcgacgccgtaaggaggcctgaatataccaaagcagaaaatcctacttcagaagaaccaaaatcagagagtcttaaagagaagtccccaactgaaacaa

SEQ ID NO: 4312 - DNA, 247 bp, Lilium asiatic
  Clone ID: LIB3230-021-P1-K1-E1
acggttccccctttcaaccatgtccatacattccattctcttacccctcaacgccaagcgcacccttatgtttttttactaaacacattttctattctctaaacatctccccttcattcaatccttccccatttatcacctgtaatttttaggttcacgtatgcgccatttcgtcaattcttgataaacctacaacggtttcttcttccaaatgaactatttttcttcatcttcattcaacgagagg

SEQ ID NO: 4313 - DNA, 424 bp, Lilium asiatic
  Clone ID: LIB3230-021-P1-K1-E10
cggacgcgtggggaagaatgcgctggagaattatgcttataacatgaggaacaccatcaaggatgataagattgcctcgaagctgccggcggaggacaagaagaagattgaggatgccgttgagggggcgatacagtggctggaggggaatcagcttgccgaggttgatgagttggaggataagatgaaggagcttgagggaatttgcaaccccataattgcaaagatgtatcagggatctggcgggatggggatggatgaggatggccctactagcagtgctggcggtgctggaccgaagatcgaggaggttgactaatctgggtgatgggtttgctgagtttctgtcctactagcgtcaagtctgtcagttggttttctgctttgttttgcagtttgtggtgttcttattctgctgcttgga

SEQ ID NO: 4314 - DNA, 404 bp, Lilium asiatic
  Clone ID: LIB3230-021-P1-K1-E11
gggaattccggggcggcccaagccgtccgggtggatggcctcttggacctgtccttgtttcgcctgattaatgcataaatctgggtgctgactttgccttagcccttgctggcattgatatgttcttctcagcctctatttgtgttgcgcaggatcggcggacgggacaggtgcatggagctggccctaggcatgagagcttgtactacatggagtttctacatattcctccaccagcagtttgtttggtcacatctactttttttgtcaaccatacaactgccaatttggggcataggcggttaggtcatgttttgtttggtcgtcttgcaagtcttatatctactggagctcttggtaatgtgacttctccgtttgagtcatgagtcatggtctggatgtta

SEQ ID NO: 4315 - DNA, 421 bp, Lilium asiatic
  Clone ID: LIB3230-021-P1-K1-E7
gaagtctccgggacctgcagaagtgctatcaagaagagagagcttgaggaaattggattggatgcattcttatttgatgtgcataagagcaagctcaaaagccttccaacgttgcaacacgccactcatgttctcatctctatccctcctgtcataggctctaatgatcctttactctgtttacacaaagacctgcgaagctcattgagtagcggaaatcttcaatgtctatgttatctatcctcaacaagtaggtgtctatggtgattgcggtggtgcttgggttaatgaggattatcatgtcaaccctgagaccgaatctgctaagttgaggttcatagctgaaaaaggatggctggatttggggcgtgaactcggagtgcccactaatatacttagactgggaggaatttatggtcct

SEQ ID NO: 4316 - DNA, 393 bp, Lilium asiatic
  Clone ID: LIB3230-021-P1-K1-E9
tgctttagcagacaactacccacttggaaaagaactacaggggaaatggacctaatccctacctgagaacagtacacaaactttcagagttgggtggtatgatgtcagataagaagttcaagctcatttccaagtctttcactatgaactcaaagaattcttcgccacaagcaagtttaaaagttgggatggatactgcaggaggagatttgaccaataacatttctttcactgctagatcattttccaaggcatatttacctcgcagcgcaagaacacatagtacattgacattttctgaaaagtgtagtgcatctgcattgcaccgggcaaatactgaagctttgttattactaacttcaaatagcagcactagggctacccctaaaccta

SEQ ID NO: 4317 - DNA, 426 bp, Lilium asiatic
  Clone ID: LIB3230-021-P1-K1-F1
agatattttacagaggttggaagagttggaagcagaggaggggattcgtcttgaagcagatgatggtgatgattttgagattgatgggcaggaattgacccccgaggagcgtgaagttttagccgagattcgtaagaagaagagcatgcttatccagcaacaccggattaagaagagcaccgcagagagccgtcccaccgtgccaaggaagcataaccatgataggaaatttacttcggagagaatgggaaggaaactctcagaggttgggttggatcctactagagcactaagtcgtgttcggagtgcatctgtaaagagaggtcgtaaaagagacagatcagttggtggagaagcaatggacattgacggtgagcaatcgaacaagaagatgcgtatgaggtcgaggtcaaggtccatgtcgcg

SEQ ID NO: 4318 - DNA, 415 bp, Lilium asiatic
  Clone ID: LIB3230-021-P1-K1-F10
gacctgggctcttcaccgacatcggcaagaaggccaaggatctgctcaccagggactacagctacgatcagaagctcagcatctcgacctacagcgtagccggagtgggacttacttccaatgcagtgaaaaaagggggactatatacatttgaccttggttcacagtacaaatacaagaacaccatcgttgatctaaaagttgacggagattcgaatgttacgtcaactgtgactgtgtcggagtttctgccatctacaaaggccattgctacactgaaattgcctgattacaactccggaaagctggaagtgcaatatttccatcaccatgctagcttttcctcagtcttggctctcaagcagtcaccgattctcgacctttcaggaactgtgggttcccatggcattgcttt

SEQ ID NO: 4319 - DNA, 133 bp, Lilium asiatic
  Clone ID: LIB3230-021-P1-K1-F12
ccggccggaattcgggtctcctaccgtcaatcttctccacttgcacctactttatactctgtataggcacaccgtggggaattcattttcttaacccacaccgtctgactgtgaaatcctcgccttcccaact

SEQ ID NO: 4320 - DNA, 422 bp, Lilium asiatic
  Clone ID: LIB3230-021-P1-K1-F4
cggacgcgtgggggcgctgaaggtgtacgccgatcgggtgtcgcagccatcgcgcgcgatcatcattttctgcaagacaaacaatatcgatttcgaggaagtgcgggtggatctcctcaagggccaccacaaatccccagatttcaaggaaataaatccaatggggcaagttccggcaatttctcatggaacatttaccttatatgaaagtcatgccattctgagttatcttgcgtgtgcgtttcctggagttccagaccactggtatcctgctgatctatatcagagagccaaaattaactcagtcctggactggcatcataccaacctacgccgtggtgcagctaccctagttcgaattaatgttctagcacctgctcttggtctgccatcaaacccagaaggtgcaaaagaagccgaag

SEQ ID NO: 4321 - DNA, 206 bp, Lilium asiatic
  Clone ID: LIB3230-021-P1-K1-F5
atcagacctgggactctttaccgacatcggcaagaaggccaaggttctgctcacaaggggctacagctaccatcagaagctcagcatcttgacctacagcgtagccggagtgggacttactcccaatgcagtggaaaacgggggactgtatacatttgaccttgggtcacagggcaaatacaggaacagccatagcgctctaaaag

SEQ ID NO: 4322 - DNA, 424 bp, Lilium asiatic
  Clone ID: LIB3230-021-P1-K1-F6
gcttggttgatgggtgtaaatctgatcttagtcatgggagggactatcatcgtcggcataaggtgtgtgaggttcattccaagactccgattgtgttggttggggggcaggagcagaggttctgtcaacagtgcagcaaatttcacatgttgacagagtttgacgaggtaaagcgaagttgtaggaaacgccttgacggtcacaatcggcgtcgacgcaagcctcagcctgagcctatcaatactgggagcttgttcctaaatcaccaagggcccagattctcctcattttcttcgatatacccatctacaacaccagagtccaactgggctgggatagttaaaactgagcaagagcctctctacacccataatcaatcttcgcatttcctcgacaggcaacaacacttccacagctacaatga

SEQ ID NO: 4323 - DNA, 419 bp, Lilium asiatic
  Clone ID: LIB3230-021-P1-K1-F8
gaaagaagctgctgatcagtcgatgaaagcttatcaggctgcttccaacacagccaacactgatcttccctcgactcatcccattcgactcgggcttgctctcaatttctcagtcttctattatgaaatcatgaattctcctgaaagggcgtgccatttagcaaagcaggcctttgatgaggcaattgcagaactggacaccttgagtgaggagtcgtacaaggacagcactttgattatgcagttactgagggacaatctcactctttggacttctgacttaccagaggatggaggcgatgatggtttcaagggcgaggaggccaaagctgctggtgatgatgagcactagtaatgactgcttttaactcccgtcttggagatttctagtagtggcggataatggctgagcaacaaac

SEQ ID NO: 4324 - DNA, 416 bp, Lilium asiatic
  Clone ID: LIB3230-021-P1-K1-F9
tgcttcagcagacaactacccacttggaaaagaactacaggggaaatggacctaatgcctacctgagaacagtacacaaactttcagagttgggtggtatgatgtcagataagaagttcaagctcatttccaagtcttccactatgaactcaaagaattcttcgccacaagcaagtttaaaagttgggatggatactgcaggaggagatttgaccaataacatttctttcactgctagatcattttccaagtcatatttacctcgcagcgcaagaacacatagtacattgacattttctgaaaagtgtagtgcatctgcattgcaccgggcaaatactgaagctttgttatcactaacttcaaatagcagcactagggctacccctaaacctaattgtagccctgaaaccccatct

SEQ ID NO: 4325 - DNA, 431 bp, Lilium asiatic
  Clone ID: LIB3230-021-P1-K1-G10
gaagaatcctcttacctgtcttctccctatgttgtggttgctctaaattgtggacgtgagagagttatgcttgttggggaggagcgcttgagctgatcaagtcaatgaatgtacctgtattcttcactgatcagtctgagatcttgtgtgcgaatgctaagcaggtccttcgaggggtggggttacagatcactcacccagtgacaccgaacccgttccgctcgccacttaaggaccaggcaccttcgagcaatttgccctcatttagcaatggttttctctttggggcgaacagatgagcacaactaatggcaactgaaagcacttaatttattgttccaagaaaaaatctttaagtgtgattgatatagaagatcaagtctaaggaaggtaagattcgttacagcgttctgtgatctgttaatttcatg

SEQ ID NO: 4326 - DNA, 341 bp, Lilium asiatic
  Clone ID: LIB3230-021-P1-K1-G12
gctcaagacgcaaaattcacatggatagcaaattagtttctttatttacaacaatttgctcaggcggcggaaggctagttactaaataaaaatttatgcacttgaaaaaaaaatgacttccaaaactagtggggcattctataagggtgatccaagggataatttttctgtttatcacaaggctaacccattcgagttttctgtcaggttctgcttttgcatctggtgctcgcttacagttgaaggatttacaactattccggtcaagagaacattcgcatgaagttgtttgcatatgccattggtttaacatttgggtgaggcactgcagaaaaactaac

SEQ ID NO: 4327 - DNA, 430 bp, Lilium asiatic
  Clone ID: LIB3230-021-P1-K1-G5
gtaaaattaacttcaggaagtcgtctacattttatcagttcaggtcgagacctgaaaacgtgtgcagcagctccgaatttgtgttacaagccagcctatccaaaaatacgaaaatcaggttggaaatatgtgttttggctcttggatgaaaagatgactattcttctccccaaggtttgttggaataggagtttggctcttggaagactccaatagaagcaaacaaagagacaatatggatctataaatatgggtctctcttcttcatccagaaatacaagagagatcataggtgaaggccggagctgcaggagcttgattgaaggtgttggagattcatctgtgtgagtaggttagccaccaaacaaagagtgagatctcgtgatcctagggaccgagatagataaatctgttgtaacctgctactttt

SEQ ID NO: 4328 - DNA, 421 bp, Lilium asiatic
  Clone ID: LIB3230-021-P1-K1-G7
gagataaagaacaagaggcagttggaccgctacctacgtgatcatcccgggggtccatctttatctgagtttgattggggatctggtgacaccccaaggcgttcctcaagaattagtgagaaggtaaaggctatagagagcccagaagatgagaagccgccaaagcgagaaaggaaatcaagctcgaagaagggtgccaaagagaaaaaagatgggggtgatgcgcctgaagcagaggatgatacatctacaactaaaagcagacttctcgctgatatcgacatggaagagtccgagaatgttgcagatgcctcttcagagaaggccaaagaagtggagttggaggaaccggagaatgttgcaggtgcctctacaggcaaggctaaagaggaacctgagaatgttgtagatgcctcgacag

SEQ ID NO: 4329 - DNA, 288 bp, Lilium asiatic
  unsure (1)..(288): unsure at all n locations
  Clone ID: LIB3230-021-P1-K1-G9
gaaaaccccgggcgacccacacatccanacataaacaaacaactacccactaaccaatgaccaacaggacaaacagaccggcgccctacctcttaacatatctacaaacccacaaaacaccacgcaatcaaaccaaaaaataatttaaagctcattaccaatactcccactatgaactcaaaaaatcctccaccacaaacaagttaaaaagctctaataaatactccaaaaacacaaacaccaataacacctccttcaccaccagatcatactccaacaaataaaaac

SEQ ID NO: 4330 - DNA, 217 bp, Lilium asiatic
  Clone ID: LIB3230-021-P1-K1-H11
ccactagggtttgttgtcaagtggatgatgggggaaaggggtgtggattccttttggggtggtggggcaaggaagtgggtgtaggatgggatgtaactttctaggctctttatggaccattggcactttttttttgttttttttgtttttaaatctaggaagctgggggaagtaatttattaattgaatgaggttatgggtacctttctcttgtttc

SEQ ID NO: 4331 - DNA, 422 bp, Lilium asiatic
  Clone ID: LIB3230-021-P1-K1-H2
gttgatagccactccagagcacaaccaaaaggggcaaatatagataacaagcatgcaaactcccaagatgatatgtcatcagacagaccatctgatccggagatactttctcaagacatgctcaagaagtatttaacatatgccaagcttaatgtctttccaaaattacatgatgctgattcgaacaagataacacttgtctatgctgaactgcgcagagagtcatcatttggtcaaggtgtcccgattgcagtaaggcatattgagtcgatgatacggatgtcggaggcacatgcaagaatgcacctgaggagttatgtcacacaggaagacgtggacatggcgatacgtgtgctactagattctttcatatcaactcagaaatttgtggtacagaaagctctacaaaagagctttagaca

SEQ ID NO: 4332 - DNA, 433 bp, Lilium asiatic
  Clone ID: LIB3230-021-P1-K1-H5
gccacaataagtcaacggaaagtcatggaagacattatggagatctttaagctagcagacaaagacaactctgggactttaaccataaaagaaattcaagatgttcttgaagatatctgcgtattgtaccctcaagttgagctctatttaaagaacaagcatatgcgtgacatagtagatttgatcgagtccaaaggtgatgttgagaaagaatccatcacactggacatacaagagtttaagaatgctctaggtcatgtggattcactggtcaagaatcttccagcaactgctcaggttgcagcacaacaaggaaactaccttgctaaatgttttaacaaaatggactacaacaaagaacatccggaaggccctcttcgtattagagaatcgggtcgacaccgatttcgtccttttcagtataagcaccttg

SEQ ID NO: 4333 - DNA, 406 bp, Lilium asiatic
  unsure (1)..(406): unsure at all n locations
  Clone ID: LIB3230-021-P1-K1-H6
acgcgtncgacactagggtttgttgtcaaggggtttatgggggcaaggggagcagactcccgttgggtctgaggaggctcataaatttcatgtcatgcaagggtgatcatatggctgtgatcgaggggacggtgacggacgacaagagggtgtatgaggttccggcgatgaaggttactgcgctgaggtttaccgagactgctagggctaggattgtcaaggctggcggngaatgccttacctttgatcagcttgctcttagggctcctcttgggcagaacacgatgcttttgcgtggtcctaagaatgctagggaggcggtgagacactatggtaaggctcctggagtgccccatagtcacactaagccttatgttcgtgcaaaggggcgtaagtttgagaaggc

SEQ ID NO: 4334 - DNA, 419 bp, Lilium asiatic
  Clone ID: LIB3230-021-P1-K1-H7
gagataaagaacaagaggcagttggaccgctacctacgtgatcatcccgggggtgcatctttatctgagtttgattggggatctggtgacaccccaaggcgttcctcaagaattagtgagaaggtaaaggctatagagagcccagaagatgagaagccgccaaagcgagaaaggaaatcaagctcgaagaagggtgccaaagagaaaaaagatgggggtgatgcgcctgaagcagaggatgatacatctacaactaaaagcagacttctcgctgatatcgacatggaagagtccgagaatgttgcagatgcctcttcagagaaggccaaagaagtggagttggaggaaccggagaatgttgcaggtgcctctacaggcaaggctaaagaggaacctgagaatgttgtagatgcctcgac

SEQ ID NO: 4335 - DNA, 419 bp, Lilium asiatic
  Clone ID: LIB3230-021-P1-K1-H8
aattaatgaagaaggggagccattgtgtgatgagcttatctgtcaagactgtgcgctcaagtgttcattcttgaagctttatcctaccgctattgtggctgcatctgaagaaaatatcactccagcgaaaagctgtgctaatgaaaatatgattgaacatggctcctcatctcttaaacatcccgagaatgaagaaagtgacatatctgtgaattcatttaagtgttcaagtgctcattctgaggcaaaaacttctactgagaagggttctgcgaacggagtaaatacgacaaaagagtcttcgggtcctgaatgcattgttggagtagatttgaatgcagcttcacttcccttgaaggaaaagaaacccctgtttctttctaaaaactggagaaaccttctttgcaggtgtgtatcat

SEQ ID NO: 4336 - DNA, 351 bp, Lilium asiatic
  Clone ID: LIB3230-023-P1-K1-A1
tcgacagcatggtccttctcacaccaatgcaggatgggtcaacgactatatcaataccattttctcataaccgccaacagtcgcgctgatcgtagcagtttttttggacaacaccctcgactacaaggacaccacccgcgacagggggatgccatggtgggtcaagtttcggacgttcaaaggcgatagccgggatgaggaggtctataccctcccctttaatattaatcgggttttcccgccatcttgataggttaaatcaaattgcgtggaaaagcaatgaatgagggttgggtgaaaggactcaaattgttgggtacaaaatgttttaagccacggtttctatttttg

SEQ ID NO: 4337 - DNA, 410 bp, Lilium asiatic
  Clone ID: LIB3230-023-P1-K1-A11
cgaaaagcatgttggagggtattaaaaagagtacaagagaaatgttgcaggagcaagaagcagttcgagatcgcttgtttacagttcaggatgttatgcaaagcactgtccgtgcatggttacaagacagaagcctgcgagtgactcataatttggcgatttttggtggttgcggccttatcatctccatcatcactggccttttcggcataaatgtcgatggcatccctggggccgaaaatactccatttgcattcgctttattttcgggaattctttttctcattggaatcatcattattggccttgggatactctatttcgggctgaaagacccaatctccgaggagcaggttaatgtaagaaaaatggagcttcaacaattggtctcgacgtttcagcacgatgca

SEQ ID NO: 4338 - DNA, 412 bp, Lilium asiatic
  Clone ID: LIB3230-023-P1-K1-A12
cagctcagctggaatcaatggacaatcggaccagatcatcagcaaccgccgccccggcacagctccggcgggcattccagtactggctcgaccgctcgacgccccatgcgacacctcgctggctcggaactctcgccgtcgccgctgtctacgcgctgcgcgtctgctacctccagggcttctacatcatctcctacggcctcggcatctacctcctcaacctcctcatcggcttcctttcccccaaggacgacctcgacctcggcgccgcgcttccgaccaagggctccgatgagttccgccccttcgtccgccgccttcctgagttcaagttctggtattctgttaccaaagcattctgtgtggcgtttctgatgacattcttctcagccttggatgtccctgtattttg

SEQ ID NO: 4339 - DNA, 422 bp, Lilium asiatic
  Clone ID: LIB3230-023-P1-K1-A2
gttgagactcacaccgaatcagaagcttgtgaaatctcatccctcaccccccatcgccgctgaatcccagcactacgatgggctcagctggatcgaacgttgtagtacctccaaactttaggttgctggaggaactggaacgtggagagaagggcattggagatggttcggttagctatggaatggatgatggagatgatgttctcatgcgttcttggatgggaaccatcattggtccacacaatactgtgcatcaaggacgaatctatcagctgaagctattttgcgacaaagattacccggagaagcctccaagcgttcgtttccactcccgaatcaacatgacatgtgtgaaccatgagactggagtggttgacccgaagaagttcgctatgttggcaaattggcagcgtgactacact

SEQ ID NO: 4340 - DNA, 409 bp, Lilium asiatic
  Clone ID: LIB3230-023-P1-K1-A3
cccacgcgtccgtgatattggcggctgcgacatacaaaaacacgaaattcgtgaagccgtagaattaccgttaacacatcatgatttgtacaagcagatcggtattgatcccccgagaggtgtgcttctctatggtcctccaggcactggtaaaactatgctcgcaaaggctgttgcaaaccatacaacagctgcttttataagagttgttggctctgagtttgtgcagaagtatctcggcgagggcccgagaatggttagggatgtgtttcgtcttgcgaaagagaatgccccggcaattatcttcgtcgacgaggttgatgccatagctacagctcgttatgatgcacagactggtgctgacagagaagttcagcgtatcctgatggaactactgaatcagatggat

SEQ ID NO: 4341 - DNA, 416 bp, Lilium asiatic
  Clone ID: LIB3230-023-P1-K1-A5
gaaaaccctagatttcctttcatagttgagatggagactggatccaaggccaagaagggtgccggaggccgcaagggcagtggtccgagggctaaatcagtcacccgctccatcaaagccggccttcagttccccgtcgggaggatcgggcgatacctgaagaaaggccgatatgctcagcgtgttggctctggagctccagtctatcttgctgccgttcttgagtatcttgctgctgaggttcttgaattggccggaaatgcggctcgggacaacaagaagaaccggattgtacctcggcatgtgtgtctggcggtgagaaatgatgaggagcttggacggctgttgggtggtgttactattgctcacgggggggtccctcccaacatcaatcctgttctgctgccaaagaagac

SEQ ID NO: 4342 - DNA, 277 bp, Lilium asiatic
  Clone ID: LIB3230-023-P1-K1-A7
ggaattaccggggcggggacgcgtccgacagcacgttccttctcacaccaacgcaggatggttcaacgactatatcaataccggggggtgatcaccgccgacaggggcgctgatcgtaacagatattatggacaacaccctcgactacaaggtcaccacccgcgacagggggatgccatggtggctcacgttttggacgttaagggcgatagccggaatgaggagttctatccctcccctttaatcttaaccggtttttctcgccatcctagatagt

SEQ ID NO: 4343 - DNA, 418 bp, Lilium asiatic
  Clone ID: LIB3230-023-P1-K1-A8
cttctgcccccttccaacaaggggttcgtccttctccgcagattccatggcgaatccactctacggctccggtcctctccgatccagagaaggtatcactgcgaggccggcggccggctccgacgagatccagctgaggatcgatccgatgcacgcggatttggacgaggagatcacaggcctccaccgaaagatccgtcaattgaaaggcgtagctcaggagattgagtcagaagcgaagtttcagaatgacttcctaagtcaattgcaaatgaccctcataaaagctcaagccggggtgaagaataacatgagaaggatgaacaagagcataattcagcatggctccaaccaccttttccatgtcatcatgtttgcgctcctttgtttcttcgtcgtctacctctgggctaagttc

SEQ ID NO: 4344 - DNA, 412 bp, Lilium asiatic
  Clone ID: LIB3230-023-P1-K1-B1
agcaagcattgcgacacggatcacttctttttaagtgatttgttacttatttgttgcttatatttggtctgctttgaatttagccgtgaatttatttttatctaattttagttgtgtttttaaaaataatatgattgaagccttccgatgaggagaatcgcagacgggcggtctgaatttgatactgagttgaatgtctgtagtttttcatatttatgaaaatatctgagaggccgtattaccaaatgttaatttatttaaattttctgtatttttattttcatgatttactttgttaacatgtattatagtttttgttgtattacggaaggttatatgtttactgtgaggaattttccataatggatgtacatgaaacaatcaaatacaacacacagaacaagtttgtaga

SEQ ID NO: 4345 - DNA, 235 bp, Lilium asiatic
  Clone ID: LIB3230-023-P1-K1-B12
tcggaacattcaactcaaggagtcttttgatgaaaagacaaaaggtctcgatctatccgggagcgagaaccagtggcttagagcacaactaaaagaggttgttatgaaactgaagaaagcatagagtgattacaaggacttgattgaccggtggatgttggagaaaatgaaggatgcggaaaagcttaatgaggctaatgcaatatatgaggaaatggtgcaaaagtttgaagat

SEQ ID NO: 4346 - DNA, 416 bp, Lilium asiatic
  Clone ID: LIB3230-023-P1-K1-B2
cggacgcgtggggtcggtttgggcacctacgaaggtcttggtgtttagttggttgatgttgaggggggcgctggccactcgagccgtcctctcgcaccgaataccgggctggaccggtacgacactttgcaacctttgtggggggcctgacgagactgcggactatttattcctttcctgcccggtttctgaagggctttggacatacttccgataggctctgagggtctaggggagacccgtctacgtcgcccaggcttggtcttcatgggggactttgggcgtgtcgaggggcttgcggcgctcctgggatatggtgtctctttgtatttgttggtgaatctggggcacgaggaatgaccgggtcttcctcgacattacctgtaacgtcgagcggttgtgggaacgttgtcgat

SEQ ID NO: 4347 - DNA, 383 bp, Lilium asiatic
  unsure (1)..(383): unsure at all n locations
  Clone ID: LIB3230-023-P1-K1-B3
agaaacaaaaatctccgaataaattagcattaatatagttacaacttacaacaacataacacatcttaccccacagattgcagtgagggaaacaacctattagcctcttccctatgctttctatatcacacaacacacaccaaccttcaaagaattccatactgaacaaaaatttgaaaacaaaacgaaaggaaagcgaacatcttctaaggctataaatagatttcttggatactttggtgcagtcctactcgaatgtatgaaggataacccgaaagagtagttactgctcttgggtaggctctgccgtccagtaactcttgacggccacgaggatcttctcggngttgaagggtccgctttcgtgatccatgatttggctc

SEQ ID NO: 4348 - DNA, 339 bp, Lilium asiatic
  Clone ID: LIB3230-023-P1-K1-B4
atttttctttttttttttagaaacacaaatttccgaatgaatgagcattaatatggtggcgacttacaccatcatgacttatctcaccccatagattgcagtgtcgggaaacaacctattaccctatttcctatgctttgtatatcacacaacacacaccaaccttcaaagaattccatactggacaaaaatttgaaaacactgcgtatggtatgcgtacatcatctatgtctatggatggcatttttgcagactatggagcaagcttacttgaatgtatgttggataacccgagtgagtggtcactgctcttgggtaggctctgtctaccagtaactt

SEQ ID NO: 4349 - DNA, 416 bp, Lilium asiatic
  Clone ID: LIB3230-023-P1-K1-B5
cggacgcgtgggctgaaattcccctttgagccgaggaagcagagctcgtgctgcattcagctgactaataagaccgatcagtatgtcgccttcaaggttaagacgactactcctaggaagtactgcgtacggccgaacacgggggttgttcttccgggatcgacgtgtcaaatcacagtgacaatgcaagctcagaaggaggctccatcagatatgcaatgtaaagacaagttccttctccagagtgtcattgtggaacatggagctacaaccaaagacataactgccgagatgttcaataaagcatcgggcaaggttattgaggaattcaagctgcgggttgcttatattcctgccaatcccccatcgccggtccctgaggaagctgaagaaggaacttctccaagatcgagtgt

SEQ ID NO: 4350 - DNA, 416 bp, Lilium asiatic
  Clone ID: LIB3230-023-P1-K1-B6
gaacattcaactcaaggagtctcttgatgaaaagacaaaaggtcttgatctatccattagcgagaaccagtcacttaaagcacaactaaaagaggttgtcatgaaactgaagaaagcagagagtgattacaaggacttgattgaccggtggatgttggagaaaatgaaggatgcggaaaagcttaatgaggctaatgcaatatatgaggaaatggtgcaaaagttgaagatgaatagtatcgaacaatttgcacggcagcaggtcgatggggtagttcgtagaagcgaaggaggatacgaggacttcgtcgagtcgcctatcccttctacatgcaagcatgccatcaatgcccatgaagccgcttgtggatccattttgtttgaaaacaactcagacaagctagtcagtgggggac

SEQ ID NO: 4351 - DNA, 415 bp, Lilium asiatic
  Clone ID: LIB3230-023-P1-K1-B9
tgtaaaagttgatattgtattaactcattgatcttaaatagtggcaggatctaggatcatggtattacaactatcatacggatatataccggggacgggtaccgcacccctatatgagatatctgtgctacatagatggaaacatggatcatcatctggaaaggatccaaaattttggaaagcctgcgagatgagattgaatgaaaggatgcatgtggatatcttggaagccaaccaggtgcctagatcgctaagagacttgttgcaaattgttgcgatatactttacctactgcagttgtttttcttatgacagagggaagtctgcctactacagtttttagaatgtaaaacacttactctgtgcccatgatgatgtaatttatgttctttttaagaaagtaaacagtaaaata

SEQ ID NO: 4352 - DNA, 287 bp, Lilium asiatic
  Clone ID: LIB3230-023-P1-K1-C1
gggaaggcgaagggcgggtccatattcatcaggttggtgtctgccgcagggacggggttcttctacgtgaagcggaagaatcccaggaagatcacggagaagctagagttccgaaagtacgatccccgggtgaataagcatgtcctatttaccgaggctaagatgaaatgataatgttcatcatgttgcccttatcactttatgcagcagcaatttctttgctttcttgaactattaaggtacgaatgctgtatgaataatacaagttcattacttgatttgttttc

SEQ ID NO: 4353 - DNA, 404 bp, Lilium asiatic
  Clone ID: LIB3230-023-P1-K1-C11
aagcacaagaagaagaaggtgaagctcgcggtgcttcagttttacaaggttgatgattccggcaaggtggtgaggctgaggaaggagtgcccgaatgcggagtgtggtgcggggacgttcatggcgaaccactttgataggcattactgtgggaagtgtgggctgacgtatgtgtaccagaaggccgaaggtgagtaagctggtttgctcgttttgttggtttagtttctgaaagaacattgttgtgttggcattcagtttcaagtctgatgttttagttgagatgttgatgaatacctgttaatcaggttattcacctgtttgaatttttttctggtcttttgttgtcatgaaatggatgctattttgatatttgctttcgtattaaattgctggttaatctc

SEQ ID NO: 4354 - DNA, 404 bp, Lilium asiatic
  Clone ID: LIB3230-023-P1-K1-C2
ccgactcgcaattcatcatcctaccattctgttacccatcttggaaaatgttctcctggtaatagtgaaatcaatgaaaaatccaagaagtgcgttatgcaagacggcgataatggcttctaccgacgtcttccgtgcatatggtcttgtcttgcttttaacctccgagtacacagctgcttttgatcaattgctacttcagctcctgctcaaagcatctcaagataagaagtttgtgtgtgaagaagctgagagagcgctggattccatggcggtctccatgtctccgatccccttgctcgtcaagctccagtcacatgttagtcataccaacatgagggtgagggcaaaagctgcggttgccatttcaaaatgtccttcgaagatggatgctgagacaatga

SEQ ID NO: 4355 - DNA, 419 bp, Lilium asiatic
  unsure (1)..(419): unsure at all n locations
  Clone ID: LIB3230-023-P1-K1-C3
gggtccctcaaaatggtcagccaagtatatcgcatgggaatatctttgctccaagcctcgcttatggacgtgggtatgggacatagtcattcaccgtacagtcaaaaatatggacgtcaaaggttctccaccttaggagtgcatgtgttgtgaactctgtgaacttgcgagtgaacggttcctggcggttttggcaatatctggaaacaaaagtacgatgcaaccgaccaatgctacagccaactggtcgacatttggtggagttgaatggaacttgctgctcatggatttacatgaaatcaaccatatacttgtatatgttattatttggtatagtagtgtattagagattntctgtatgatgctcaaagttcatttctgtgtaggaggtattagttactcattttggtactcgcatg

SEQ ID NO: 4356 - DNA, 382 bp, Lilium asiatic
  Clone ID: LIB3230-023-P1-K1-C4
gcgactctcaaaacggtaagccaagtttatcgcatggaaataggtatactccaaggcggggttatggacgtgggtgtgaaacataggcattcaccgtacaaacaaaaatatggacgttaaaaggtatccaccttaggagtgtatgttttgtgaactttgaaaacttgagagtaaacgggttctggatatattggtaatatctggaaacataaattcgaatcaaccttccaatgttacatctaactaatctacattagggcgtattgtatggaacttgcatttgacgtgtatataagaaaataaccatatgcttgcatatgctattacttccaacattacggtattagagattgctgggtatagagcttaaagatttgtcttt

SEQ ID NO: 4357 - DNA, 416 bp, Lilium asiatic
  Clone ID: LIB3230-023-P1-K1-C5
ccaatttcaagatgcagatctttgtcaagacactcaccggcaagaccattactctggaagttgagagctctgacactattgacaatgttaaggccaagatccaggacaaagagggcatccctccggatcagcaacgcttgatcttcgccggaaagcaacttgaggatggtcggaccctggccgactacaacatccaaaaggagtctaccctccaccttgtcctccgcctcaggggaggtatgcagatctttgtgaagaccctcaccggcaagactatcactcttgaggttgagagctcggacaccattgataatgttaaggctaagattcaggacaaggagggcatccctccggatcagcagaggctcatctttgctggaaagcagctggaggacggtcgcacactggctgactat

SEQ ID NO: 4358 - DNA, 413 bp, Lilium asiatic
  Clone ID: LIB3230-023-P1-K1-C6
ctgtcttcttaatctcgcctggtgcgttttccaggcttggcagtgtttgcctagcaaggagttctcttggaatatgttatcattgtttacaaaatctgggatgctgtttttggaaataagcttgatggcctttctactccaaggaaatcatgctggtggattggaagcgttgacacgtacctttgtggtctcaggagtcattgttgctggtgatatactgcttaaggccatctatttatttggttttggggtgccactgttcattgatagtgaagtaaccccaaaccgggtgaaatggggtttatggatcgtccacaagctgttgatctcttcagtttatggcctcattttgttcatgtaccactcgaaatggcgagaaagattgcctgcaaggcctgcattctacaactata

SEQ ID NO: 4359 - DNA, 415 bp, Lilium asiatic
  Clone ID: LIB3230-023-P1-K1-C7
cggacgcgtgggtgcttcagctgctctgtttctagctcttgctctgttgatcttctttttcacaaaccagcaagaaatgggggaggagctgcccaagtccatttatgatgtcactgtcaaggatataaacgggaatgatgtgagtctgagtacttatagtgggaaggttcttcttattgttaacgtagcctctaaatgtggctttacccattctaactacaaagaaatgaatgttttgtatgaaaagtacaaggataaaggatttgagattctggcatttccttgcaaccagttcggtggtcaagaacctggaaacaacgaggaaattcaggagacagtttgcaccatgttcaaagctgagttccctgtctttgataagattgaagtgaatgggaagaatactgcacccctctac

SEQ ID NO: 4360 - DNA, 243 bp, Lilium asiatic
  Clone ID: LIB3230-023-P1-K1-D1
gggattcttccgcaactacctccttcccctcggcaaggcccagatcgtcactccactcctgatcaaggaaatgcggatggaagaagaaaggattgaagctgagaaaaagcgggtaaaagaagaggcccagcagcttgctctaatttttcaaacggtcggagctttcaaagtgaaacggaaaggtggtaaggggaaactaattttcggaagtgtgactgcccaagatcttgttgacataatcaa

SEQ ID NO: 4361 - DNA, 419 bp, Lilium asiatic
  unsure (1)..(419): unsure at all n locations
  Clone ID: LIB3230-023-P1-K1-D2
aaacagaatactggtggaattggtaataaacagaagaagacctcaaagtttcaccgagtccgattgggtgatggttcagctgcagctcttctcaatcctgatcagtcagatgcaagtccagagcatcctagtagtgaacaccaagaggggactgtacccgtacgaggtgtttggaagaatgggggcggactgaaaattgtcaagtcttcgaggtagaagaaagatgttttttgcacggaaggcaggcattttgcctatggtttggtgttttgtgctctctcctgtttgttccaacatggtgtctgaagctagccctgcaacagctgatgggggttggtaggaaattttttaggaccctntgttggatatagcatggtgccgtttcagcagttaaaagctaagtttattatcaattatgc

SEQ ID NO: 4362 - DNA, 411 bp, Lilium asiatic
  Clone ID: LIB3230-023-P1-K1-D3
aaacagaatactggtggaattggtaataaacagaagaagacctcaaagtttcaccgagggcgattgggtgatggttcagctgcacctcttctcaatcctgatcagtcagatgcaagtccagagcatcctagtagtgaacaccaagaggggactgtacccgttcgaggtgtttggaagaatgggggcggactgaaaattgtcaagtcttcgaggtagaagaaagatgttttttgcacggaaggcaggcattttgcctatggtttggtgttttgtgctctctcctgttcgttccaacatggggtctgaagctagccctgcaacagctgatgggggttggtaggaaattttttaggatcctttgttggatatcgcatggtgccgcttcagcagataaaagcttagttgattatc

SEQ ID NO: 4363 - DNA, 459 bp, Lilium asiatic
  unsure (1)..(459): unsure at all n locations
  Clone ID: LIB3230-023-P1-K1-D4
cgnntccgctctcaaactctcaacnnaatggcagaagggagaagaaggggggtgatgctnnngcttgacttcgtgggtcaagcctcaattcggcccagcgtgcttcggattggccctggcnagagaagggggntggagtaccgagtactagcgaacaggatcntgcgggaggaagagccctctgctgctcaannatccaactctgtgcacaaganaaatccncggtccttcatccantgacggcaaggncttgtgtgtgagtcgctcatcatncgtggagtacatttagacgaggtctggagcgacaanggcgccgctgcttcccgaaagatccctatgcaagggcgcaagctcggttctgggccgactacatcgacaaaaagatattcgagtgcgggtcgaggctgtggaagcttaaaggcgagggactggaggcggcaaagaaggacatgatcgaaa

SEQ ID NO: 4364 - DNA, 408 bp, Lilium asiatic
  Clone ID: LIB3230-023-P1-K1-D5
ctctcaactctcaacaatggcagaagagaagaagggggtgatgctgcttgacttgggggtcagcccattcggccagcgtgctcggattgccctggcagagaagggggtggagtacgagtacagcgaacaggatctgcgggagaagagccctctgctgctcaaatccaaccctgtgcacaagaaaatcccggtcctcattcatgacggtatggctgtgtgtgagtcgcttatcatcgtggagtacatagactaggtttggagcgacaaggcgccgctgttcccgaaagatccctatgcaagggcgcatgctcgggtctgggccgacttcatcgacaaaaagatattttagtgcgggtcgtggcttgtgtaagcttaaaggcttggtactggaggcggctaatattgtca

SEQ ID NO: 4365 - DNA, 280 bp, Lilium asiatic
  Clone ID: LIB3230-023-P1-K1-D7
ctccatcggtggatgaaataacagactttttgcacagagccgggtactcaagatggggaggtgaaaggggtattaatggtctcaaaggcgagaggattcggtcaatgatctttactggccctacattttaccagaggctgacccatatggccgaagacaaagtgaagttcaaaaacaccggtcccgttcacccccttacgcgggaggcggtagcttacaaaaaaagattttgtggggttaaatttggggagatggaaagggattgccttcttgcacattg

SEQ ID NO: 4366 - DNA, 336 bp, Lilium asiatic
  unsure (1)..(336): unsure at all n locations
  Clone ID: LIB3230-023-P1-K1-D8
ggaannccggggcggcccacgcgtncggaaggcttttgcaattaaaatatcctggataaaatccgtgtgcacngggacgactgtaaatttaacttttttacgtcatgatcaaagtgccagaggttacttgttgtatttgctcggttgcacagactttccggacaagactgggaataagatctctgcgtactacttacaaagaattatggacttggatggtgtacataacttggcctggggcattgggcgtacttgcccacctttatatgcagatgggtcttgcaaccagaagaggggtgaggcaaatttctgggaatttgacactctcacaggcat

SEQ ID NO: 4367 - DNA, 398 bp, Lilium asiatic
  Clone ID: LIB3230-023-P1-K1-E2
gcttgcacaactcattactttagaacttgttaaacctctaatggaggccttgggtgagggtgcttatggcgctggcttcattgagttcttctcagaggaagcaaaacgcatatatggagatataattccttctacacttgctgatcgttggttatttgtactgaaacagcctgttggagtagttggagcaattaccccgtggaactttcccttggccatgattacacggaaggttggccctgctttggcttgtggctgtacggaggtggctaaaccttcataatacacacgcttgactgctttatcttcagctgagcttgctctactagcttgtataccatcggttgttcttaatgtggtaatgggcatttttccggagatttgcgatgctttaatgt

SEQ ID NO: 4368 - DNA, 413 bp, Lilium asiatic
  Clone ID: LIB3230-023-P1-K1-E4
cggacgcgtgggtgaagctcctcaactctacctccctcgctctcctccttataatcatcctcactgactcctatattgagcgaacttctgccaccttcgtcgccagtacagtgttctgcagcggtaagtgcaaggtgcgctgctcgaaggcgagcgtcaaagatcgatgcctgaagtactgtgggatctgctgcgctaagtgtaactgtgtaccgtcggggacttacgggaacaaggatgagtgcccctgctaccgcgacatggttaccggtggagcaaagaagaagcctaagtgcccatgatgagttggttatgttttgttgtcctggttgagaattggtatgaagtttgtagtatttcttaaatctagtatgagatgtaaatgatgagagaagcttggctatttcttaggg

SEQ ID NO: 4369 - DNA, 395 bp, Lilium asiatic
  Clone ID: LIB3230-023-P1-K1-E5
cggacgcgtgggtgaagctcctcaactctacctccctcgctctcctccttataagcatcctcactgactcctatattgagcgaacttctgccaccttcgtcgccagtacagtgttctgcagcggtaagtgcaaggtgcgctgctcgaaggcgagcgtcaaagatcgatgcctgaagtactgtgggatctgctgcgctaagtgtaactgtgtaccgtcggggacttacgggaacaaggatgagtgcccctgctaccgcgacatggttaccggtggagcaaagaagaagcctaagtgcccatgatgagttggctatgttttgttgtcctggttgagaattggtatgaagcttgtagtacttcttaaatctagtatgatatgtaaacgatgagagaag

SEQ ID NO: 4370 - DNA, 376 bp, Lilium asiatic
  Clone ID: LIB3230-023-P1-K1-E6
atgacttctttaaacatttgtggtttatgggaagactcctatgaaaacatggtcaaagaatgttatcaactatgtctctctttagatttgggtgcctctcgttgattaccatgccaaaaatggtaggttggattattcaggtaggaaagttatatttgtgagtttcaagtcttgtgcgaatggctttaagctttgggatctatgagacaagaaggtcgtgatcaacaatgatgtcacatttgatgactcctccaactccatgcaggtggcgtggatacccatgcttgtataagggcactaacaatgccaatcggcccactaatcaagcccattattggaaggaccgatcatcaatcccgtccatgacttagcaaac

SEQ ID NO: 4371 - DNA, 348 bp, Lilium asiatic
  Clone ID: LIB3230-023-P1-K1-E7
cggacgcgtgggcggacgcgtgggcggacgcgcgtgctatgcgcgagaggcagagggatatgaacgcttagctcgcgtgaacgaaggtatcttggaaagtgaagacaccgaggatatcttttatgatggggcacagcatggaactggacagccgggtatatgggagaaggcccctaagccttaaggggcgcaatggatcttctttacatggtgtacctattgatgatgtatatacaagcgatatagaggctggggatgaatgatctgacactacacacacaagcaagaggagataatgatggttctctatctgctcagctaaaaactccatttgctggtgaggctact

SEQ ID NO: 4372 - DNA, 415 bp, Lilium asiatic
  Clone ID: LIB3230-023-P1-K1-F10
cgaatatggtcaatcaaatgctagagtaaccgatacttcatctgcacaagcaaggaaaggaaaagatattcaaggaattccttgggataggcttagtatcacgaggactaagtacagacagactagattagaacagtacaagaattatgagaacattccaaattctggagaagcatcagaaaaggaatgcaaactgactaagaaaggggcaatgttttacgaattctggcgcaatacaagatctgtgagatcaactattctacattttcagcttagaaacttagtctgggctacatcaaagcacaatgtatacctcatgtcgcactataccattattcattggtctgtattgagctgccagaagtcagaagtattgaatgttttgggacatgtagctccgtctgagaagcacccg

SEQ ID NO: 4373 - DNA, 413 bp, Lilium asiatic
  Clone ID: LIB3230-023-P1-K1-F11
cagatacaccgaggaagccaagttgttgaagttgttgcagtgattgcgggaggttggagccggggatgatattcagtactgttggatgaagattgagtttgttgtgggagttgtgaaagtgttgcatttgttatatttgttgcgggagagaagatgggagtcgttggagcagttattatattgtgttataaatagagttgaggcagagagaataagggctctcggtgggtgagataaacagtgggtaggagttgttattttgtggtgaggccgagagtttgacacacagagagttgtttttctttttctttggtgaggcagagaggttgtagaggtgctaatcccttgtgacagaaggagtggtgtacttctcagtgctctgtaaggattgattcttttaatttattattgat

SEQ ID NO: 4374 - DNA, 272 bp, Lilium asiatic
  Clone ID: LIB3230-023-P1-K1-F12
acgcaaatacaccgaggaaaccaagttgttttaattgttgcaatgattcccggggggtggagccttggatgatattcaatactgttggattaagattgtattttttgtaggagttgctaaagtgttctatttattatattttttgtgaaagagaaaatgatattcttttcaccatttattattttttgttataaataaaattgagaaataaaaaataatgtcttcttgttgttaaaataaacatttacgtagagtatatattttatttaata

SEQ ID NO: 4375 - DNA, 416 bp, Lilium asiatic
  unsure (1)..(416): unsure at all n locations
  Clone ID: LIB3230-023-P1-K1-F2
cccacgcgtccgcggacgcgtgggcttagatgtttttcagttcttcgtcttggatcatggtctgtaagttggtgtcattctcattcatgtctgtatccttatacttgactgctgtatctgtaacttgcttttatgaaatattgatctactgctttaacgttatagctcatgaattgctatgcaattagtctgtgaggacgttaactggataacaggggtacattagataaccaattcctgagtactaataacccaaataggactactagttaatggaatggtgagagtgattatgcagattgaagctaatggttaagcattagagtcaatcggcctctaatcttgaagggttagaccgagttctgaatccgtgagaagtaatccttgngaacttttcagtaattgggtggagttcc

SEQ ID NO: 4376 - DNA, 327 bp, Lilium asiatic
  Clone ID: LIB3230-023-P1-K1-F3
cccacgcgttcatggacgcgtggacttatatgtttttcagttcttcgactaggatcagggggtgtaagttggggggattctcattcatgtctgtatccttatacgggactgctgtatctaaaacttgcttttatgaaatattgatctactgttttaacgttatagctcatgaattgctatgcaatgaggctgtgaggacatccacaagataacaggggtacattacataaccaatgtctgagtactaataacccaaataggacttctagctaatggaatgatgtgagtgtttatgcagattgaaactaatggttaatcattatagtt

SEQ ID NO: 4377 - DNA, 411 bp, Lilium asiatic
  Clone ID: LIB3230-023-P1-K1-F6
caagagaattgggaattgggaagacttaaagaagaaaaaaaagaaaagacccatgcccatttccggtttgaaaaacctcttatgactttttttttcgattataaacgatggaatcgtccatttagatatataaaaaatgatctatttgaaaatgctgtacgaaatgaaatgtcacaatattttttttatacatgtccaagtgatggaaaagaaaaaatatcttttacgtatccatcaagtttatcaactttttcagaaatgatagaacgcaaaatttctttatacacaatgaaaaaactaagtaatcaagacttatataattattggatttataccaatgaacaaaaaaagtccaacttaagaaatgaattgataagtcgaataaaagttctagaaaaagaaaagggatct

SEQ ID NO: 4378 - DNA, 414 bp, Lilium asiatic
  Clone ID: LIB3230-023-P1-K1-F9
ttcattactgcccgcctttagggttttgctctccgaacgatcaaagatgcctctcccgaacgacattgatctgctcaacccgccggccgatctcgagaggaggcggcataagctcaaacgcctcgtgcagtcacccaattcattcttcatggatgtgaagtgccagggatgtttcaacataacgactgtgttcagccactctcagactgtggttgtctgcgggaactgtcagggtgtgctgtgccagccgactggtggcaaggccaggcttaccgagggatgctccttccggcggaaggcggattgagctcggttttggtctgttctcttagcactcactctccaatctttctgcggatgataaggatgttagaggcttactcatgagatctatagtttctatggagtcttttt

SEQ ID NO: 4379 - DNA, 355 bp, Lilium asiatic
  unsure (1)..(355): unsure at all n locations
  Clone ID: LIB3230-023-P1-K1-G10
aaaacggggggggagacgggggggggggaaaaagaaagaaaaaaaaaaangaaaanagagaaagaaaaggaaaaaaaaagaaaagaaggggaaaaaaaaaaaaaggaaaaggnggaaaaaaaaaaaaaaaacggaaaaaaaaagaagaaggaaagagaaaaaaaggaaacaaggggaaaaaaaaaaacaaagagcagggagaggaaaaaaaaaaggagaagagacgaaaaacgaaagacaacaaaaaagaagagaacaaggaccaacaaagaggaagaaaaaaacaaaaggaaagagggcaaaaaccaccaaaaaaaagaaagaaaagaggaaaaagaaccaaaaggagaggggg

SEQ ID NO: 4380 - DNA, 418 bp, Lilium asiatic
  Clone ID: LIB3230-023-P1-K1-G4
aaatgttacacatcaagttgtattaacagatgctcatcgcaaccagcttgcacattccagaggcaaattcgctcagtatctttgcaagatcttaggaatctactattcatatcacaatgatgcctatgctacaaatggtgttttccttcatgatccgacggctcttcttgcagccgttaatccatctcttttgacttacaccgagggaattgtacgggttcagacaagtggcatcacaaggggtcttacattatttgataacaccaagaaacggtatgaagaaatcaccgagtggaccggtaagcccactgtcaaggttgctgttacagtcgatgctcctgctatcgtcgagctggtcatggaaaggctcatgaactcttagtgccgatcgaagatcccaaattcaaagcatacattt

SEQ ID NO: 4381 - DNA, 414 bp, Lilium asiatic
  Clone ID: LIB3230-023-P1-K1-G5
caaccctccatctggttctccgcttgaggggtggtatgcagatcttcgtcaagactctcaccggcaagaccatcacccttgaggttgagagctccgacaccattgataatgtcaaggcaaagatccaagacaaggagggcatccccccggaccagcagaggctcatctttgctggtaagcagcttgaggacgggaggactcttgctgattacaatatccaaaaggaatccaccctccacctggttctccgtctgaggggagggatgcagatctttgtgaagaccctcaccggcaagaccatcacccttgaggttgagagctctgacaccattgataatgtaaaggccaagatccaagataaggagggtattcccccggaccagcaaaggctcatcttcgctggcaagcagcttg

SEQ ID NO: 4382 - DNA, 409 bp, Lilium asiatic
  unsure (1)..(409): unsure at all n locations
  Clone ID: LIB3230-023-P1-K1-G7
agaaaacacaaatgatagcataaagagaaagatgaaactactactgctctgaaggtaaatcgtcaccacctcggctctatcgctacagttaggctacgtgcgtctacctgaggaccatgaaagaaaacatgttcacataaaacaagtataattaacctaatttattttattcagataagcaagtgattatatgcaagtacaaacatctaatttattaaggaattaagttttctaatatgtaccatcatatgttaaaataaagacttataaatagtaaagtatatatttaatctttaagttgtgggggagaagagatttatgaaccctggtttcacgtgcgactaacgtggtcctggttttatttcacatcggngcacgaccctttcagtccaataaagaattacacatt

SEQ ID NO: 4383 - DNA, 138 bp, Lilium asiatic
  Clone ID: LIB3230-023-P1-K1-G8
gaaaacacaaagatagcaaaagagaaagatgaaacactactgctctggagggaatcggaccaccgggctgtacgctacactaggctacggcgctacctgaggaccagaaagaaacatgtcacaaaaacaagaaagaac

SEQ ID NO: 4384 - DNA, 417 bp, Lilium asiatic
  unsure (1)..(417): unsure at all n locations
  Clone ID: LIB3230-023-P1-K1-H1
cttgaagagattagagataatgcctatgactgttctaggcgttataaggaacgaatgaaggagattcatgaccgatatatcaagcccaaggattttcagataggtgaccaagtcttactatatgacactcgattgcacctattccctggtaagcggaaaactaggtggaccggaccatttatcatcactcatgtccattcccacggttctttcgacatcattgatcccgataccggttggatgttccatgtcaatggtcatcgtctgaaggagtaccgaagcttctttcctactgctggttctcgaaacattgaggacaatgtttaaatttaagtgtaggggtggtttgtgatcccatgactacatnctatactcagattattcattcttttgtgcatatactgattctattaaaaa

SEQ ID NO: 4385 - DNA, 350 bp, Lilium asiatic
  unsure (1)..(350): unsure at all n locations
  Clone ID: LIB3230-023-P1-K1-H2
ctngaagagagnagagagaaggcctaaaactgnacnaggcggaaaaaggaacgagggagggagangcaggaccgggacatcaagcccaaggatactcagataggtggaccaagacttactatatgacacttgattgtatctattgagtggtaagcgtaaaactaggtggaccggaccatttatcataactcatgtgcatacccacggttctttagacatcattgatcccgatacaggttgaatgatccatgtcaatggttaacgcctgaaggagtaccgaagcttttataatacggctggttcttgaaacattggaggaaaatgtttaatttaaagcgtaatggggtatg

SEQ ID NO: 4386 - DNA, 320 bp, Lilium asiatic
  Clone ID: LIB3230-023-P1-K1-H3
cgagaacagagaagagagaaggcctacaactgttttaggcgttataaggaacgggtggtggggatttatgactggtatatcacgctcaaggaattttcagataggggacgaagatgttactatatgacactcgattgcacctgttacctgggtagcggataacttggtggaccggaccatttataattacttatgttcatttccacggtgctttactcataattgagcccgatacaggttgatagttccatgttagtggttatggcctgaaggaattcttattctttattcgtactgttggtttttgaatcatggttgac

SEQ ID NO: 4387 - DNA, 414 bp, Lilium asiatic
  Clone ID: LIB3230-023-P1-K1-H7
gcggatcttcaagcggttcgacaccaacggggacggcaagatctcgctgtcggagctgacggaggctctgcggactctggggtccacctccgccgacgaggtgcagcgcatgatggccgagatcgacaccgacggcgacggctgcatcgacttcaacgagttcatcaccttcagtaacgccaacccggggctcatgaaggacgtcgcaaaggtcttctgaaacatcacatcatcatcaataggataccatcgatgatcatgcccccaacgtgtcatttcatctggcctgcctcgccggtcttattgctggcggtcacctccttataagtactactagtaggattttgttttgttttattttatattttcatggtcaccaatcaaatatatatgtggacttccatttatttaaca

SEQ ID NO: 4388 - DNA, 419 bp, Lilium asiatic
  Clone ID: LIB3230-024-P1-K1-A12
ctcttaatgagatatacgtcgaggaggaggattatgataggttaagagaatcaatgtgagatgcatgatcaatttgatcagattggactcgcacagaagattgagaagcacgagcttcttgagatgagaagggtagctgcaaacatctataagaaagcagggagatggaagcaatccattgcactgtctaagaaggataatttatacaaagatgcgatggagacttgctctcagtctggtgatcgtgatctgtccgaggaattgcttgtttatttcattgagcagggaaagaaagaatgctttgcatcatgcctcttcatttgttatgacctgatccgtcctgatgtggcactagagctagcttggatgaacaatatgattgattttgctttcccatacctcttgcaggttattccggg

SEQ ID NO: 4389 - DNA, 424 bp, Lilium asiatic
  Clone ID: LIB3230-024-P1-K1-A8
ggatgaatatgcattgcttctaaaagcaaaatgtgattactctaagctcaacaagttggtgcatgacttgctaaacattgatcctgcaagagcagaatcttttgttgctttatcaatattatgggaaaggaaggatgagagaagagctgttgtgtatgctgaaaagagcctcaggatagatgatcgacatgtgttaggctatatagtaaagggtaacctccatatgtcatcaggccgagcagatttggcagcagcagcattcaaggctgctcaagaattaaggcctgatctccgttcctaccaaggtgtagttcgttcctacctggcaatttctagactgaaagaggctttatatgctgctcgtgaggcactgaaagccatgcctcagtcggcaaaggtttttaagttagtcggtgatgtccat

SEQ ID NO: 4390 - DNA, 425 bp, Lilium asiatic
  Clone ID: LIB3230-024-P1-K1-B3
atgaggaaggatcaagggtgacagcagctgatatagtagctcatatccagaatgagattgatcgtggagttgaagatgcagctgtcttacatagagtgcagtcccaataccagcacccgcaaacttcaccgatcattgcaactcccggcccacaaatctctttagttccacatgatcaggcagcatctcggaccggtcacccagatcagataagaaactctgttttttcaaatgctctttcgagccctgttcgtttgtgcctgcagccgtaccaactagctcaggaagggagttgcccaatcggtggacatgcagtgaggagccatgattcatcgatggacatgcattccgatagctccacaaatgaacattactgacaagaggttgtaaatgttggtgtccgggtcctggattgaatatgtgaa

SEQ ID NO: 4391 - DNA, 208 bp, Lilium asiatic
  Clone ID: LIB3230-024-P1-K1-B4
gaagcacatattccttaaaaccattagagtttcaagtttcttatttcctaaaacctttagggggtcaaattcttttccttttttataacctaaaaccgttttgggggttactgagagacttaaaaacaaactttgggattttaaattgggtgaacactttccaaccgggcggccggaaattaagtcaacagggattcttttgaaacaa

SEQ ID NO: 4392 - DNA, 423 bp, Lilium asiatic
  Clone ID: LIB3230-024-P1-K1-B6
cggacgcgtggggttggacaaagatataaccatgattggcatcaaagggattgtgaatgggatggatattaatttttggaatccattgacagacaagtatatcactgccaattatgatgcgacaacggtaacggaggcgaagcgtgtcaataaacaagcactacaagcagaagttggcttgcctgtagacccagacattccagtgatagtcttcgtaggaaggctagaggagcagaaaggctcagacattctcgctgcagcaattccagatttcattgatgagaatgtgcagataataattctcggaaccggcaagaaaatctttgaaaaacaggtcgaagaaatagaagagaagtacccggacaaggcgagaggaattgcgaaattcaatattcccttagctcatatgatgatggctggagg

SEQ ID NO: 4393 - DNA, 412 bp, Lilium asiatic
  Clone ID: LIB3230-024-P1-K1-B7
caaaaccctagccctcgctccccttaccatggccgacgcctactggaggtacagcgagtccgcacggcacccggcggccatgccgccgccggccgccgcccctctgaagcgcccgcggcccgattatcccgatatgcctgttggtccggaaatgcatggctactatggagatgatggaagaggatctggacaacatgcaattagggacactgattctatcaatgcgtcttatgaccgatttctgcgcaatggcaacccttacggccctggagaaaatgttagaccattgggtggcatgccaggtcgccctgtagaagatttgcgcatgttgggtgccggtgatggccggaatgtcggagttggaggtggcaggccagaactactccctcctgatgcctccaacacagtcttt

SEQ ID NO: 4394 - DNA, 418 bp, Lilium asiatic
  Clone ID: LIB3230-024-P1-K1-B8
aattcaagaggaagcacaaaaaggacattagtggtaacccgagggccctcaggaggttgaggacatcatgtgagagggcaaagaggaccctttcctccactgctcaaactacaattgagatcgactccctctatgaaggcattgatttctattccacctttactcgggccaggtttgaggagctgaacatcgatctgtttaggaagtgtatggaacctgttgaaaagtgtctcagggatgccaagatggacaagagtagtgttcatgatgttgttcttgttggtggatctaccaggattcctaaggtccagcaattgctgcaggactttttcaatggtaaggagttgtgcaagagcatcaaccctgatgaagcagttgcttatggtgctgctgtccaagctgctattctgactggtga

SEQ ID NO: 4395 - DNA, 428 bp, Lilium asiatic
  Clone ID: LIB3230-024-P1-K1-C1
gcggcggagaaccacagagagcggcgatggtttccctcactctccagaagcgcctcgccgccagcgtcctcaagtgcggcaagggtaaggtctggctcgaccccaatgaagtcagcgagatctccatggccaattcccgccagaacatcaggaagctcgtcaaggacggcttcgtcatccgcaagccccagaagatccactcccgatcccgcgccaggcgtgctctcgaagccaagcgcaagggccgtcactccggatacggtaagcgcaagggaacgagggaggcgaggttgccgactaagattatttggatgaggaggatgagggttttgcgccgcctgctgcgcaagtaccgtgagtcgaagaagattgacaagcatatgtatcatgatatgtatatgaaggttaagggtaatgtgtttaagaat

SEQ ID NO: 4396 - DNA, 392 bp, Lilium asiatic
  Clone ID: LIB3230-024-P1-K1-C11
cgcggcggaggcggaggggacagccgaactcgaacaatcatggctaggggtttgaagaagcatctcaagaggctcaatgccccgaagcattggatgcttgataagcttggcggtgcatttgctcccaagccgtcatctggtccccacaaagcaagggagtgtttgcctcttatccttattctccgaaataagttgaagtatgctcttacctaccgtgaagttcaatcaattctcatgcagcgacatgtcatggttgatggtaaagtccggaccgacaagacctaccctgccggcttcatggatgtcgtctctattccgaagacaaatgagaactaccgcctcctctttgacaccaaaggtcgcttccgtctccactctataaaggatgagga

SEQ ID NO: 4397 - DNA, 404 bp, Lilium asiatic
  Clone ID: LIB3230-024-P1-K1-C12
gccgcatattccccgtccgaagatgaaggtctgcatgctcggagatgctcagcatgttgaggaggctgagaagattgggctggactacatggatgttgaagggttgaagaagatgaataagaacaagaagctggtcaagaagcttgcaaagaagtatcatgctttccttgcatctgaggccatcatcaagcagattccacgtcttcttggcccgggtcttaacaaggcagggaagttccctacactggtgactcatcaagaatctcttgagtcaaaggtgaatgagaccaaagcaatggttaagttccagctgaagaaagttctttgcatgggtgttgcagtagggaatcttggaatggaagacaagcagatctttcaaaacgtgcagctcagtgtcaattttc

SEQ ID NO: 4398 - DNA, 427 bp, Lilium asiatic
  Clone ID: LIB3230-024-P1-K1-C3
gagcgaagcgttcgtcagctagagaaaaaatagatccatctgaagtggaacaggggtcttcgaagaagaggagcacaagggtgacacattcagggaaagaggcgaacggttcaagtgttcagcaagagctaggaaagataaatctaacagaaacctcttcttctcttgtgtagcaagaggaaattgacttcgtcactcactgtcaatgaagaagatcgaggtgaagtcatacagattgccgacagtcccaccattgcttcgaagaagcagcctgagaagcggtcatcagctcggctcaggtctcgctgacgtattattcaccagcttgctgagtttgaagttagtaatgactggcaacacccagcaagcaaaggttgtatcttcagagaggagatgagttcccattaaaagataaacacattacgat

SEQ ID NO: 4399 - DNA, 281 bp, Lilium asiatic
  Clone ID: LIB3230-024-P1-K1-C4
ggtgctgagaggagtgtgtgtggtggccctcctatggatggggacggtgctgtggatgttgttgctgccgcttttcctttgtttttgtttcggtgttatcggtgcctagctaggattgtgggtgatgaagatgtattatctatgaaaggaggatgttgtaggtggtgtttttctctaagtggaaagatccatggatgtgtatgggatattatggttaaaaaaaaaaaaaaaaaaaacaacagaaacaaaaaagcataaaaaaaatcaaaaataaaattatt

SEQ ID NO: 4400 - DNA, 277 bp, Lilium asiatic
  Clone ID: LIB3230-024-P1-K1-C9
agcgaagagttcttaaattaaagaaaaaaaatatccatctgaagaggaacaggggggttggaagaaaaggagcacaaaggtgacacattcagggaaagaggggaacggttcaagtgtttagcaagagctaggaaagataaatctaacagaaacctcttcttttattgttgtagcaagaggaaatagacttcgttacttactgtcaaagaagaaaatagaggtgaaagtatacagatgggcgacaggtccaccattgttgtgaaaaaacaggctgaga

SEQ ID NO: 4401 - DNA, 406 bp, Lilium asiatic
  Clone ID: LIB3230-024-P1-K1-D10
gtgataattggtcctgccgccaaaagagtaaaagttatcagttcggggcggaagattttatcgatgaaaccaaaaaatcggaaatcagaaaaaaaatgtaaaatcggagaatgttaagtaataaagaatacagataactattgataagcattgtaagaaaaatgcatctgatttgtagtatctttgctaaatggcacaaaagatgatagaagtgtttgagttatgagctttaccaaaagaaaaatagttcctacttcacaatccaaatattacttgggaaatcaaacatcagagtccaatagactattcactgaggcatcacctgacttgaacattaatataataaacatgattaaattggggttaattgtgatcaagtcgggaacactcgtgattagtttgcaat

SEQ ID NO: 4402 - DNA, 280 bp, Lilium asiatic
  Clone ID: LIB3230-024-P1-K1-D12
gatctactcttaagcacggctgaggaggaagaaagaagagcccccatcaccgaagggttcggcatataatacgctcgtggtctattgaacggtcgaattccatcactatcttgtcgaattgacaagtgcaaagcgggacatcatataccaactattggttggacgctccacaaactacctgccccataggtgactgactggggttggggacctctaatacatctcacacaaccttcctttaagggtaaaccataaattcgtctagattcttatccatttg

SEQ ID NO: 4403 - DNA, 420 bp, Lilium asiatic
  unsure (1)..(420): unsure at all n locations
  Clone ID: LIB3230-024-P1-K1-D6
gatctcctcttaagcacgtctgagaaggaagaaagtagagcccccatcaccgatgggtctgcatatagtgctcctgactatgacggttcttcagcacttcttgtcagttcacaagtgcaaagcgagacatcatataccaactctggcttgcacgctccacagactacctcacccattgatgacttactgggtttgggaacctctattacatctccagcaccttccttaaagctcaacccaaaagcagttctagatccgggcccatttcaaaaaaaatggagccaactggcaacatctctatcacaggaatgctctctaagccctcaaggtgttgtagctntggcgacacctcanaccctactccgccacatgcaaggccactccatccagtgcattgcctcaggaggtcaagcaccgaac

SEQ ID NO: 4404 - DNA, 417 bp, Lilium asiatic
  Clone ID: LIB3230-024-P1-K1-D7
cgctctcatgatgatgactggaatgtttgtgaatggtccctatgcattgataactacggcagtatctgcggacctgggcacacacagctccttgaacgggaattcacgcgcgctagcgacagtgacagcgatcatagatgggacaggatcagtgggggctgcaatcggcccgcttctgacagggtatatctcgtctaggagctggagtggggtgttcatgatgcttatggtggcagcacttgtggcagggcttctcttaacgaggttagttgtggctgaagtttctgcgaggatagaggattcgagatttcggagagcaggtggtgtctcggggtcctcggtggagacattagtgtaatgtatgcaatggtagaagaagaatgatagttagagggtcacttgtctggtgatgagtca

SEQ ID NO: 4405 - DNA, 415 bp, Lilium asiatic
  Clone ID: LIB3230-024-P1-K1-D9
gccgagcgccgtcggtgaaatcgtccctctcaaaccgattagttctccaccaaattgcaccagaagaatccccttgatcccccgatcatttatccccaatcgattttgaatttgatcgagcaaatccagagatctcgatcaattcctcgacagccagatcgacgaagttcaactgatacacctcttcttcgatcgacacttttctatctaatctcctttatctctctgttatcttatcttcgatcctaatttgtttcttgttttggatttcaggtactggatgcatgaagcattggagttgtgaggaaggagctccggtagccatggatcgtgcgagagatagagcatcgaagatgaagaaatgatggctgcatagctttaaagctgagagtttccttgacagccaaggtttaac

SEQ ID NO: 4406 - DNA, 422 bp, Lilium asiatic
  Clone ID: LIB3230-024-P1-K1-E1
atcccctctccgtctgagattccccggttgagagagatggggctcactttcaccaagctgttcagccggttgttcgcgaagaaggagatgcggattctgatggtcggtctcgatgcggctggtaagacgacgatcctgtataagctgaagctgggcgagatcgtcaccacgatccctaccatcggattcaatgtggagactgtcgagtacaagaacattagctttactgtttgggatgttgggggtcaggataagatcagacctctgtggaggcactacttccagaacacacagggactgatattcgtcgttgatagcaatgacagagatcgtgtggtagaggcaagagatgagcttcacaggatgctaaatgaggatgaactgcgggatgctgtgttacttgtgtttgcaaacaaacaaga

SEQ ID NO: 4407 - DNA, 419 bp, Lilium asiatic
  unsure (1)..(419): unsure at all n locations
  Clone ID: LIB3230-024-P1-K1-E10
ctgaaggagagcctctagcctcttcacaccgcatcagacatggcgcaggatgcttacattcccagtgaaaatccagatgcattctctgataataaaatgtcagttcattccccaatacgtaaaactgggtctgacacaggagccacaaagcccaaagacgcgagaccagtaagcggggaagacggtgataagccctcagactctcctatacgccatgagccggcggctaggagaccaattccagactcatctcatcgccgacatggggaccgaccaagttcaggtgatccgatgagaaggccgatgaaagtaagtggtgcatctgaccgccgagaagatcactcttcccgtcacccccactctcaaccgaaatcttntggcagaggtggattttcttctcctcgagaaagaagggggtc

SEQ ID NO: 4408 - DNA, 228 bp, Lilium asiatic
  Clone ID: LIB3230-024-P1-K1-E12
cacgcgtcgccaccgtcgccaccgtcgtctttcaattataaaaatattttgggggggaggagtggtaaacaggcagtcctgtcgatgcagtgacaaacattgaactagttgtacaagagttgatcatgctaggcgtattgaaggatattgcttttattatagacttttttcaaaatcagaaggcagatcgttatgtatctcaggactaaataaaatagctgatgcact

SEQ ID NO: 4409 - DNA, 421 bp, Lilium asiatic
  Clone ID: LIB3230-024-P1-K1-E3
gttctagatggaaaagcataccatctgtatgttaacgacgggaacaattcgcttcatggtgggcataggggattcagtaatgtcttctggactgtgaaagaaaaagtagatggtgaaatcccttacatcaaattatactaccatagttttgatggtgaacaaggtttccctggggatcttgatgtgtatgttacctacaagctttcaggagactctgagttggatgtgaccatggaggctaaggccctgaacaaggccaccccagtgaacctcgcacagcacacctactggaacctcggggggcatggcagtggcacaatcctagacaaccaggtccagatctttgcgtcatacatcacaccagtggatgaaaaccacattccgacgggtgcgatcacatctgtttctggtactccattcg

SEQ ID NO: 4410 - DNA, 414 bp, Lilium asiatic
  Clone ID: LIB3230-024-P1-K1-E4
gaagaaggcagctgaggagagggaggctgctgtcaaagcatcctctaaaaagaaagagagtggcaagtcctctgtcctattggaggtgaagccatgggatgatgagactgacatgaagaagttggaagcagcagtccgcagcattgaaatgcctggtctcttatggggtgcatcaaagcttgtagaagtaggttatggtattaagaagctgcagatcatgatgactattgtggatgaccttgtctccgtcgacactcttattgaagagcgtctcaccgttgagccttttaatgagtacattcagagttgtgatatcgctgcattcaacaagatctaaagcttgtttgctgccgtttaggaccacgttcttttacttattttctgaggataatgtttaatctttcaacttattga

SEQ ID NO: 4411 - DNA, 178 bp, Lilium asiatic
  Clone ID: LIB3230-024-P1-K1-E5
cggacgcgtgggcggacgcgtgggcggacgcgtgggcggacgcgtgggttaaaatcaattctaataatataccccctgaatagcttaacataatcaaaatgggagggctacatattttgattatgttaagctattcagggggtatattattaaaatcaattctaataaaagcgaaagc

SEQ ID NO: 4412 - DNA, 421 bp, Lilium asiatic
  Clone ID: LIB3230-024-P1-K1-E6
cccacgcgtgcgcccacgcgtacgctccgttcacattactaaatcttattttggacaaggaggagttgcataaacaggcagtttctgtcgatgcagttgacaaactttgcaactcgttgtacaaggatttgatcatggctaggcgtctcgaaggaatattgcttttattagcagaactttgttcgaagatcgagaagtgcagatcgcttatgtcatcgcatgtactaaataaaattgctgatgcacttgtgcacgaatctacgcaagtacgtattgctgcatgcacctgtatccagagcatttcccggtcagttaagaatctgagtgcaggatttctctctaatgaggcagtcattgtaccgatggttcaacttttgtacagaccagaaacatccctacaggttgctgcactcgatgctat

SEQ ID NO: 4413 - DNA, 414 bp, Lilium asiatic
  unsure (1)..(414): unsure at all n locations
  Clone ID: LIB3230-024-P1-K1-E7
aggtcgccggctagggtttacggcgaaggcggaagggaaggagaggaggagcagcgagatgggggaggctcggaagatcgtggtttcatctctccagtttgcttgctccgacatcgtctctcaaaacgtcgacaccgccgagaggttggttagagctgctcatgccaagggtgccaacattattctcattcaggaactatttgaaggctactatttctgtcaagctcaaaggggtgatttcttccaacgtgctaagccttataaaggacaccctaccatatcaaggatgcagaaacttgctaaggagttgggtgttgtgatacctgtaagtttcttcgaagaagcaaataatgcccattataattcaatagccatcattgatgctgatggaacagatcttgngttggataggaa

SEQ ID NO: 4414 - DNA, 350 bp, Lilium asiatic
  Clone ID: LIB3230-024-P1-K1-E8
ccggaatggaagggtcgggccacgcgtcccgttctagatggaaaagcataccatatgtatgttaacgacgggaacaattagattcggggtgggcataggggatttagtaatgtcttctggactgtgaaagaaaaaggatatggtgaaattccttacatcaaatgatacttccatacgtgtgatggtggacaagggtttcctggggatcttgatgtgtatgttacctacaagcttttaggagactcttagttgggtgagaccatggaggctaatgtcctgaacaaggccacccctttgaaagctgcactgcacacattactggtacctaagacgtgctaggagtgggacaa

SEQ ID NO: 4415 - DNA, 414 bp, Lilium asiatic
  unsure (1)..(414): unsure at all n locations
  Clone ID: LIB3230-024-P1-K1-E9
gcgcctgattgcgtcactggcgatattgtgtttgtcctccaacaaaaagatcaccctaagttcaagagaaagggtgatgatttgtttgttgaacacacactctcccttactgaagccctctgtggttttaggtttgtgttgacccatttagataatcggcagctgctaattaaatccgagcccggtgaagttgtcaagcctgatcaattcaaggcaataaatgatgagggtatgccaatgtatcagaggcccttcatgagggggaagctttacatccacttcacagttgacttccctgactcactgacgcctgaccaggttaaagctcttgagagtgtgctgncgtcgagggctgcatcacagctgactgatatggagttggatggatgtgaggagacaactatgcatgatgtc

SEQ ID NO: 4416 - DNA, 241 bp, Lilium asiatic
  unsure (1)..(241): unsure at all n locations
  Clone ID: LIB3230-024-P1-K1-F1
aaaaaaaaacaaaaggaggaagaaaaaggggaaaaaaaaaaaaaaagggggggaaaaaaaaaaaaaaaagaaaaancnagacgagagaaaaaaaaaaacaagggggaaaagaacacgaaaaaaaaaaaaaaccgcgggacaaaggagaaaaaaaaaggacgggggaaaaaaaaaaggaggaagggaaccacaaaaaacccaaagaaaaaacacaggaaagaaagggagacaggggggggcg

SEQ ID NO: 4417 - DNA, 418 bp, Lilium asiatic
  Clone ID: LIB3230-024-P1-K1-F10
ggccggcgcaaaccctctcggcagtgctcagttcgccggaaccctagggttttggtccgccaccgaatggacccgaaggacggcgacgaggaggaggagtttggattctccaggaactacttcctcgcccgagaagctggctccggcagctcccacaagaaatccgctcgcaagctctccgacatcgatctcatcgaagaaaagggcctgagagcagcagcttcggaaattgcacctaaacatgaaaaagagattgcggttctgttaaagagctatacagatttgtaccctaagtggctcatcgagctgaggtgcggatttggactcttaatgtttggctttggttctaagaaagttttgcttgaagactttgcgtcaacaatgctgactagttctggagtaggtgtaatcaatggct

SEQ ID NO: 4418 - DNA, 421 bp, Lilium asiatic
  Clone ID: LIB3230-024-P1-K1-F6
gtcgatttcatcttctcttacccctattgacgggaacgaccgccgcgatccggactgtttccggtcaccttccccgatccggccaggtgacggcagccgagtgagctgtagttgttgctgggattgctagctcatcttctggagctagtttgattcactcatattctggacctcttattaggtggatcgaccaaaatttataaaacttcttttggcttgaggatgacctcaccgatgatggggaagaggcaagaggagagggggagatctgttggtgctaacgaccagtagcaggtggatgacatgtttatatgcttctcatgttggccaggctgttctacatgcaactttctccagtgaattacagccctttgattcctcggttgggccaactgtcttaaaagcaacttcaatgttagct

SEQ ID NO: 4419 - DNA, 420 bp, Lilium asiatic
  Clone ID: LIB3230-024-P1-K1-F7
cagcaggacaatgatctgagagagtcaagtcttcaggctcatcacaaggacgagctgaagaggatacaacttcatgctgaaattgagctgagagagaaagtatcttctttgaggaaagaacacgaaattcaaataaaatctttgaagatggaacatgaagatggttgcagaaggttacaggaagaattggagctgcagaagtcaaaagaggacaagcaaagagcattattgcagctgcagtggaaagtcatgagtgaaaatcaacaacatgaccaagaagtgaactccaagaaggaatactctgtttcatcaataaagaagagggatccatataatggaaaggaacacaaacttgcagcaaaaagccctggtaacaaaaaagatgtaaatttgccgggatatgtgcgcacaccaatatca

SEQ ID NO: 4420 - DNA, 418 bp, Lilium asiatic
  Clone ID: LIB3230-024-P1-K1-F8
cctttttcggtctgggaaaacagattcacaggagcttggatgatgttcgaatgaatctggaagttctcaagtactgtgctactgtgttgttcttggaatcaagcttcccggacatgtactccatgaacagttggatctctgagaatggcgcacgaaaccaggttaatggaaaatcctctcctgaaggaaataaacgaaacttcacacctccatctgatgatctctgtagtaaaaggaagtcatggactatggaatgcaagactactttggaggtcaatcatgtggcagaatctagtatgtctgtacggactgtactagaaaaggaggatccttctgacttgatatcacatattgcacaaataaatatagatcctttacaaactggcagcactggagagcaatcttctgtacaatcacc

SEQ ID NO: 4421 - DNA, 404 bp, Lilium asiatic
  Clone ID: LIB3230-024-P1-K1-G1
cggacgcgtggggatcgccaattgctgtgaaccattccagagtactcaatgctgttcaggaagcacgcagggcagcggagaaagcattcgatgtgccgagggtcgatgagagagtgaacaaggcggtgacagcagccaataaagcagcagttgcagcgagagttgcggcggtgaaagcggtccaaaagagattgccaaataatggtgatgatgtccctattccaattgtgtgacattttgttcgctcaataccggcatagattagcgtgacagagacaccaaagtttcctacagcgcccacctgtattagtttgaaaagaaattttccttggctggggcattctgttttttgctcaacttttgtaaagatatcgagcatcttttaggatatgtgtgacaatgta

SEQ ID NO: 4422 - DNA, 404 bp, Lilium asiatic
  Clone ID: LIB3230-024-P1-K1-G11
gtcttccatccgaatattaacagcaatgggagtatttgcctcgacatcttgaaggagcaatggagccctgccttgaccatatccaaggtgttgctctcgatatgttcactgctgacggacccgaacccagacgaccctttggttcctgagattgcacacatgtacaagactgataagaccaagtatgagactaccgctaggagctggacccagaaatatgcaatgggttagcagtgccgcaatgtcattaaatttgatgttcacccttttgtatgtaagaatgaaatagtccgtccaaaagaccaggaccgaaactggacctccgacgctccaaagattctgacattgatgtcgattgtttgcgtgagaatttcatatttaaaaacatagcttatttttaattt

SEQ ID NO: 4423 - DNA, 441 bp, Lilium asiatic
  unsure (1)..(441): unsure at all n locations
  Clone ID: LIB3230-024-P1-K1-G12
ccggaacgnaagggcggggcggcccacgcgtgccgcgctggcaggccaatatgaacagcaatgggagtatttgcctcgacatcttggaggagcaatggaaccctgtcttgaccatatccaaaaggtggctatcaatatgggtactggtgacggacccaaacccataacacacttggggtgctgagattgggcacatgatcaagactgataagaccaagtgtgaaactaccgctaggagctggacccagaaatatgcaatgtgttagcagtgccccaatagcaataaatatgatggccacactttctgtatgttagaatggaaaagtgcggccaaatgaactggaccgaaactggacctacgtcgctccaaaaattttgacattgatgtcgaatgagttggggaggaagttatatttaaaaaacaaaagggatttttaatat

SEQ ID NO: 4424 - DNA, 422 bp, Lilium asiatic
  Clone ID: LIB3230-024-P1-K1-G3
gagattattcacaatccgacggtcaacaagaggttagaagaaatggaagttaaaaatattccaattgaggatgggaggaaacaatttgatgttgttgacaagggtgatgtcgtggttttacctgcatttggagccgctgtagatgagatggttgttctgagtgaaaagaaagtacaaattgttgatacgacatgtccatgggtttcaaaggtttggaacaccgttgagaagcacaagaagggtgaatatacttctatcatccatggtaaatattctcatgaagagactgttgctactgcttcatttgctggaaagtatatcattgtaaagaacatgtcagaggcaatgtatgtttgtgattacgttcttggaggtgagcttgatgggtctagctcaacaaaagaggaatttctcgagaaatt

SEQ ID NO: 4425 - DNA, 280 bp, Lilium asiatic
  Clone ID: LIB3230-024-P1-K1-G5
aatattaacagcaatgggagtatttgcctcgacatcttgaaggagcaatggagccctgccttgaccatatccaaagtgttgctctcgatatgttcactgctgacggacccgaacccagacgaccctttggttcctgagattgcacacatgtacaagactgataagaccaaggttgagactaccccgttggacattgtcccaaaaatatacttatggttatacttactcccttctaccattaaaagagccttttacaccttttgtatgtaagaaatgaaat

SEQ ID NO: 4426 - DNA, 424 bp, Lilium asiatic
  Clone ID: LIB3230-024-P1-K1-G6
cggacgcgtgggcggacgcgtgggcggacgcgtgggcgccgccgccgccgctcttgccgtccaaagcacacgagatctcaagctccgcaacaagatggggaagactcgtggtatgggagctggacgcaagctgaagacacacaggaggagacagagatgggcggataagtcgtacaagaaaagtcatctgggaaatgagtggaagaaaccttttgcaggttcttcccatgctaagggcattgtccttgaaaagataggaattgaagccaaacagcctaactctgccatccgaaagtgtgccagggtccaacttatcaagaacgggaagaagattgcaggaagatggttttgatgatgctgatgcagcggatgaggatagtgatctagagaaggaagaggatgctcatgatgagctttagatgga

SEQ ID NO: 4427 - DNA, 380 bp, Lilium asiatic
  Clone ID: LIB3230-024-P1-K1-G7
cgtcttcttcctcctctccctttcaattgcagctgatgcctcctctcactgttccaatcaaggatcttcatttgttagaaatataagtgctatacctcaaaatgacttcgggaaaaaaggtctagcacacatctctgttgtaagcgctgtctctcatggaatgaaagaggttgaagtttggcttcagactttctccccaggatcaagaacaccaatccataggcactcttgtgaagagatttttgtcgtgttaaaagggagaggtactcttttacttgcatcaagctcgcacaagttcccaggaaagcctcgggaaatccctatatattcaaacagcacctttgccatccccgtcaatgatcctcatcaggtttggaact

SEQ ID NO: 4428 - DNA, 406 bp, Lilium asiatic
  Clone ID: LIB3230-024-P1-K1-G9
cccacgcgtccgcggacgcgtgggttctgaccaagtcctttacctccgaatttcctcacgttgaaaggtacttttggactttggttaaccaaccaaatttcctcaaggtgattggcgaggtaaagcaggcagaatctgttcctcctgtaccaaagaagcctgtccatcccaagcctaaggaggcaaagaaggaagtcaagaaagaggctgtgaaacctaaagaagttgtagctgtggaggaagaagaggaagcaccgaaaccgaagccaaagaatcctcttgatctcttgcccccaagtcctatgatattggatgagtggaagaagctgtattctaacactaaaaccaacttccgggaggttgctatcaaaagattctgggatatgtatgaccctgagggatactc

SEQ ID NO: 4429 - DNA, 391 bp, Lilium asiatic
  Clone ID: LIB3230-024-P1-K1-H1
cgggtctgtttaaacagatccggcccgaattgcaccataaatcttctataggcatttctgggctcatcggagctctaattctggtcacaattgcatctgtgcactcctcttttcgttggatacataacaaaatatgacctccttcttttcaatttaaaaatttaattacctcggcattctttgagacccaaggaagtgttagaagtattaatagggggggtattagaaccccgggttctttaagtgagagtttcctccctccttgctcttgggactacgtttggagttatgcgagtcttgggcttacagactcatctaggtggcattgatttcactgtcaattatgttatcataaggagctctctgtcttcgtcacatttgaccgttatac

SEQ ID NO: 4430 - DNA, 259 bp, Lilium asiatic
  Clone ID: LIB3230-024-P1-K1-H11
cctttatatggtctgggggagcttccacaggcatttgctcgccttagtggctgttatgggggggccataccttttggataaaccctgatggcagggaagatttaaccgaaaaagggaaggtttggggggggcttcttgagggggaaccggttaattgcaggaaattgggtggggaccattttacttggcaaaccagggtaggaagggttggaaaggtggccgggcaattggtattattagccattccatttcaaacacc

SEQ ID NO: 4431 - DNA, 308 bp, Lilium asiatic
  Clone ID: LIB3230-024-P1-K1-H12
cgggaacgaatagccgggggcgagccacacgtgcatctttatatatggtgggggagcgtccacaggcatttgctcgccttaaagcgggggatggggggacatacatgttggataaacctgagtgcaaggtagaatttaacgaaaaaagggaagattggggggtgacttctgtaggtgagactgctaaatgcaagaaaattgtgtgtgatccatcttacttgtcaaacaaagatagaaaggttggtaaagaagctagggcaatttatatgattgagcaatcccattctaatcaccaaaaaatttaattt

SEQ ID NO: 4432 - DNA, 360 bp, Lilium asiatic
  Clone ID: LIB3230-024-P1-K1-H3
caaaataaaatagagaaaaacataaaaagagggggaaaaaaaaaaaaataaaaaaaaaaaaaaaaaaaaaaaaataaaaaagaaaaaaaaaaaaaaaaaaaaaaaaaaaaaaaaaaacaaaaaaactaaaaaaaaaaaaaaaaaaaaaaaaaaaaaaaaaaaaaaaaaaaaaaaaaaaataaataaaaaaaaaaaataaaaaaaaagaaaagataaaaaagaaaaaaaaaataatgagaaaaacaaaaaaaagaaaaaataaaaaaaaaaaatatataaaaaaattataaaagagaaaataaataaaagaagaaacaataactaaaaaaaaaaaaaaaaatgagaaaagaaaatgtaaaa

SEQ ID NO: 4433 - DNA, 413 bp, Lilium asiatic
  Clone ID: LIB3230-024-P1-K1-H6
ggcacttgtcaaactgcaacaaagtggaatcatccttgaatatcaagttaactttgaaaaattggcaagatacatcattgggtggccggagaagacattggttgggagtttcattgggggtttaaaggaagaaattcactatgatgtcaagatcttcaaaccatccaccgtattagcaatagtcgggttggcacagattcaagaggagaaactgcagaagcaacgataaatcgcgaagtcggcagagtcttataaggcgcaacatacatccaccatgccgagaaccactcccaacagtgtgtcattcaagaaactaacatggacatagatgcaagctagacgtaaaaaagggttatgctacaattgcgatgagaagtttgtactaggacatcattgtaagatacaactctacc

SEQ ID NO: 4434 - DNA, 410 bp, Lilium asiatic
  Clone ID: LIB3230-024-P1-K1-H7
cggacgcgtgggcggcgagatcattagccgatttgagaagaagggattctatctgaaagggctgaagatgcagaacgttgagcgatcgttcgccgagaagcactacgcggatctgtcctcgaagcctttcttcggcgggctggtggagtatattatctccgggccggtggttgcgatggtgtgggagggaaagaatgtcgttgtcactgggcgcaagatcatcggggctaccaacccggcggagtcggctcccgggactattcgtggtgatttctcgattgagatcggaaggaatgtcattcatggtagtgattcagtcgatagcgcaaggaaagagattggtctgtggttccctgaaggcatcgccgagtggcagaacagctcccacccctggatttatgagcactgag

SEQ ID NO: 4435 - DNA, 371 bp, Lilium asiatic
  Clone ID: LIB3230-024-P1-K1-H9
ggaagttgataacttgcacacaaccccggagcttttgtacacttggattggtactgtggtggatgcttaccatttcagtagagaaggcactctcataagggaagcaagagacttgatgaaccccaaggttattcagagattggagaacctcaagatactagtcaagaataattttctctagatttcaagcattacactttgtttgggaccgagttcgtgttgtttttacataagtatgtcgaatagtagactcgagacttttgtttatatacatggattctgaatcccaaattgtcatatttcaaaccatgtatacggtcgttaatgtaaatctttaggcactaagatcataaaaaaaatgttgtatgtta

SEQ ID NO: 4436 - DNA, 389 bp, Lilium asiatic
  Clone ID: LIB3230-025-P1-K1-A10
gcggcagaacttaaaatgaaggaaaaaagacgagtggagcatgagaaacacctggcacgtaagaaaaggcgaaggttggaagccattaaggagatgcttgagaatgaagaggaagacaatatggaacaggaaactggaggtggcaaaaaagagaaaaccggacaatcactagttgatcttgctcaccgtcgagcaaaatccatgaaagccaaaatgaaagtgcacgaaactgggatggtttcaaaaattgctggcaagaaggccaaaagtcagacgagaaaagatgagatgcgggaactgtttgagggtgatatgagtgaaaagaaacaatcacatacatcaaagagaagcaacactattgcagcaaagaaaaaaagctaagagttcgt

SEQ ID NO: 4437 - DNA, 386 bp, Lilium asiatic
  unsure (1)..(386): unsure at all n locations
  Clone ID: LIB3230-025-P1-K1-A11
ctttgaaggagttgtcttgtggctccatggccggttcctgctcaaaaaaggctgtggatgatgaanaagatgataaatcggttgatcaggatgaggatgttggagaagagaagctgagccagacctcgaatgcgtcctctgtcaacgcccctctcaaggctaaatccgtctcggataatagaaaagagaaatcactgagcttgctcacccaaaattttgtcaagctcctactgacaacaagtgctgagaccgtttcgctcgatgaagctgccaagttactgctcggtgacggccccgattcgacagtaatgagaaacaataatgcagccaaagtccgtcgcctatatgacatagctaatgtgctgtcctccatgaacctaattgag

SEQ ID NO: 4438 - DNA, 142 bp, Lilium asiatic
  Clone ID: LIB3230-025-P1-K1-A2
ccccgaacggcgagggatgcccataagatatccattgagcatagcaagtataattggcacgggatgtcgaacatactcatttggtcaaaggtttggattatgctttgctaaacacgggaaggagcgtaagtgataagaaacc

SEQ ID NO: 4439 - DNA, 402 bp, Lilium asiatic
  unsure (1)..(402): unsure at all n locations
  Clone ID: LIB3230-025-P1-K1-A3
cggacgcgtgggcgacgatgcggcggtggagagggtggtggactccaaggaccagcagcagcagagcaaagccttcgacaagctcaccgaccgcgtcgaggaccgtcagctcgactccacccgcgtccaagaggcgatggcgtcgcttgcttcatccagagaagctgatctgaatgcgatgagattgagggagaaagagcttgctgcagtgaagatcaatacctctgatgtggacatcattgcgaatgagctcgagctggacaggaaggtggcggagagaaccctgcgggagcacanaggtngatgcggtgctgctgtatgctatttgctccgctaggggactcgtgctggagatgtgagaannatatatatagttgagtgcaatcgtgtatctagattacc

SEQ ID NO: 4440 - DNA, 379 bp, Lilium asiatic
  Clone ID: LIB3230-025-P1-K1-A4
cggacgcgtgggttcttgtagctcttcatctctctcttctcttcgcgggaatcggcgctgaggatctgcaacacggtcacccgactgagagaatttcaggtagtgctggcgatgtactagaagacgatccagtcggaaggttgaaggtgttcgtgtatgagctgccaagcaaatacaataagaagatcctgcagaaggatccccgatgcctcactcacatgtttgctgctgagatcttcatgcatcggttcttgttgtctagtcctgtccgaactcttaatcccgaagaagctgattggttctatactcccgtatacacaacatgtgacttaactccaaatggactccctttgccattcaaatcaccacgaatgatgag

SEQ ID NO: 4441 - DNA, 365 bp, Lilium asiatic
  Clone ID: LIB3230-025-P1-K1-A6
cggacgcgtgggttctgttttattgctttatgcaagtaattaaccttatgaattgatactttaccatgtgtctatgtgccttacacttctctgtgctgatgtacctaggggttgaagatggctctaacagagcaactccccctaggacattactagcaatgttaattgtattcacttatcatatgaccctatgtttgtatgttcaagaacagatagtatgcttatgtccctgtacatgttttatgcaactctgcatgctatgtcttttgctggttaataagaacagagctatatgaggttttagctatgggttgcaatgatgacaatataagtttgataaatgttgataagcaaaattttaatgc

SEQ ID NO: 4442 - DNA, 135 bp, Lilium asiatic
  unsure (1)..(135): unsure at all n locations
  Clone ID: LIB3230-025-P1-K1-A7
cttccggccaatgatgcgtcataaggtatccattgagcatagcaagtatattggcaggggatgtcgaacatactcatttggtcaaaggtttggattatgctttgctaaacaaggtaaggagtgagnntntttttt

SEQ ID NO: 4443 - DNA, 219 bp, Lilium asiatic
  Clone ID: LIB3230-025-P1-K1-B1
acaccactaccgggacccatgcgtaccggagaggctcaccatgagcaactttctgttgctgagatcacaaacactgcttttgagccttctttaatgaggggaaaatgtgacccccgccatggcaagtacatggcctgctgcctcatgtatcgtggagatgttgtcctcaaggatgtcaatgctgcagttgccaccatcaagaccaagcgcaccatccag

SEQ ID NO: 4444 - DNA, 320 bp, Lilium asiatic
  Clone ID: LIB3230-025-P1-K1-B10
agcaagcattgcgacacggatcacttctttttaagcgatttggtacttatttgggggttatatttgggctgctttgaatttaaccgtgaatttatttttatctaattttagttgtgtttttaaaaattatatgattgaagcctttctatgaggagaatcgcagacgggcggtctgaatttgatactgagttgaatgtctgtagtttatcatatttatgaaaatatctgagaggccgtattaccaaatgttaatttatttaaattttctgtattattattttcatgatttactttgttaacatgtattatagtttttgttg

SEQ ID NO: 4445 - DNA, 276 bp, Lilium asiatic
  Clone ID: LIB3230-025-P1-K1-B11
aaattgcagaaacatttggatttgagcatctaagtgctggtgatttgttgagaaaagaaatatcatctgattgtgaaaatggagcaatgatccgtgagattattacagaaggaatgattggtccatcagaaattacagtcaaattgatccacagaacaattgagtcttccaagaacaacaaattcctaattgatgggttcccacgaagtgatgaaaatagagttgcttttgaaaagataaccggagttgaaccagacatcgggctattctttgatt

SEQ ID NO: 4446 - DNA, 382 bp, Lilium asiatic
  Clone ID: LIB3230-025-P1-K1-B3
agcaagcattgcgacacggatcacttctttttaagtgatttgttacttatttgttgcttatatttggtctgctttgaatttagccgtgaatttatttttatctaattttagttgtgtttttaaaaataatatgattgaagccttccgatgaggagaatcgcagacgggcggtctgaatttgatactgagttgaatgtctgtagtttttcatatttatgaaaatatctgagaggccgtattaccaaatggtaatttatttaaattttctgtatttttattttcatgatttactttgttaacatgtattatagtttttgtgtattacggaaggttatatgtttactgtgaggaattttccataatggattacatgaaacaatca

SEQ ID NO: 4447 - DNA, 212 bp, Lilium asiatic
  Clone ID: LIB3230-025-P1-K1-B4
ggcgggacagtcaactcaaggagtcacttgatgaaaagacaaaaggactagatcgatccgaggagcgagaaggggggactaaaaggacagcgaaaagaggatgtcatgaaactgaagaaagcaaagagcgaagacaaagaacaaaaaggaccggaggaggggaaaagaaaaggaaaagacgacaaaaaggcacgaatgaaaaaagaaaacgg

SEQ ID NO: 4448 - DNA, 381 bp, Lilium asiatic
  Clone ID: LIB3230-025-P1-K1-B6
aaaaggcttaccatgagcaactttctgttgctgagatcacaaacactgcttttgagccttcttcaatgatggcaaaatgtgacccccgccatggcaagtacatggcctgctgcctcatgtatcggggagatgttgtccccaaggatgtcaatgctgcagttgccaccatcaagaccaagcgcaccatccagtttgttgactggtgccctactggatttaagtgtggtattaactatcagccgcctactgtggttccgggtggtgaccttgccaaagttcagagggcagtttgcatgatctccaactctaccagtgttggccgaggtgttcttttcgcattgatcaataagtttgatctgatgtatgccaagcgggcctttt

SEQ ID NO: 4449 - DNA, 390 bp, Lilium asiatic
  Clone ID: LIB3230-025-P1-K1-B7
gctgtggatcgacgggccgaagaagaagaacgttgtctcggtctccgggataccgaagtactcgtacaaggacttgcagaaggcaaccagtaattttaccacggtcatagggcagggggcattcggtcctgtttataaagcccaaatgtccactggggagactgttgctgttaaggtgctggctaacaattctaagcaaggggagacagagtttcaaaccgaggttctacttcttggacgattacatcataggaaccttgtgaatttggtgggttattgtgcagaaaaaggacaacatatgctaatatatgtgtttatgaccaatggcagtcttgcttctcacttgtatagtgataagcagcaacctttgagatgggatctaaggattgg

SEQ ID NO: 4450 - DNA, 376 bp, Lilium asiatic
  Clone ID: LIB3230-025-P1-K1-B9
ggtttataggaatttaagccggacttcgaggatccttcaaggaagaaggtttgggaggaggatagctatgagaggcatattatcgagaactatggaatcaagctttctggaatccatgcggatacgatgcatctagcacggctctgggattcttcaagaaaactcgatggtggatattcacttgaagcacttactggagatccaaaagacatgtctggaaactcgccaaccttcagagacccttcaaatatgggaaaagacttggctgcaacgggatcaatcaactatagatagatgtccgggaagatatcaatgaaagctatcttttggaaagaataagcccaaaaaagacggaactgaaagaaaactcaataaa

SEQ ID NO: 4451 - DNA, 398 bp, Lilium asiatic
  Clone ID: LIB3230-025-P1-K1-C1
cggacgcgtgggtgcacttttattttagttggcatggtgtatgtaaaattggaggtcacaaattcaaatggtttattcttaatgttgctattatcacagagagtaccggctcagtgattaagtgtatacatttcactttggagttaagacgtcggaatatgtataaaatatttttttcgcgacaaatggataccgcactagcgggatggttggttttagttgttctgtgagcagaatgcggctgccctaagttgtgacatcctgtgagcgtgttggatcctagattatgatggagcacgagtgtggttgtcacagtcagtgagcaggttgagctgctatgggtaaccttgactattcaaaacttcatcctagtgttgggattgtccaacttagttaac

SEQ ID NO: 4452 - DNA, 375 bp, Lilium asiatic
  Clone ID: LIB3230-025-P1-K1-C11
gagtatttgaggtctccttggcagaccttcaacatgatgaggatcacgctcacaggaagattcgtctgaggtgtgaggatgttcacggcaacaatgtcctaaccaatttctggggaatgagtttcacgacagacaaggtgaggtctttggttcggaagtggcagaccttgatcgaggcacatgtagatgtgaagaccacggataactacactctgagaatgttctgtattggattcaccaaaaggcgccctaaccaggtcaagagaacctgttatgcacagtcgagccagatcagacagatccgtccgaagatgatggaaataatgatcagccacgcgacttcttgtgatcttaaagaattggtgcagaaattca

SEQ ID NO: 4453 - DNA, 392 bp, Lilium asiatic
  Clone ID: LIB3230-025-P1-K1-C12
cagaagaagaagcagcgagcctcaaaaggaataagggtagatgcggatggcgatgtgacattggaggacgttaatgccgaaaatgagcaagctagggctttaaaagaaagcgagcgtgccgagcatgacaatgcaaaacctgttgacaagaagagaaatgtaagttcgaacaaggaaaccacttcgaaattggatgaacgcagtccgaatggatatgatgagggacaaccgaggtcaaagagagcgaagagggcaaagagaagcatcaatgacaacattgaatctacagttgattcgacgatgaactaccagccgtcttcttcttattatggataggtagggttggtgcgacaacaaaatatagctgattttttttgttgcggcatgcagac

SEQ ID NO: 4454 - DNA, 351 bp, Lilium asiatic
  Clone ID: LIB3230-025-P1-K1-C2
aatacacatccgtctaacactctgtcaacgcgtcaatccaaacattcctcgctcggttggcagctaaatgtaaatagatcgataaactattgatctcaatgctcactaggctcgttgtttatcagatactacatcttggacccaaggaggagcatcgggtctgctatcatacactcagagagagtgcacatcgaccgagccgactatgtaccagatgaacattgcctgtattgactagccacaacagcatgtgaccgtatggagcgaccatttacgagccatcgccgggcttgtctttagagctgcgacatgatggagaacaacatggtgttagatcacggatctaagctc

SEQ ID NO: 4455 - DNA, 229 bp, Lilium asiatic
  Clone ID: LIB3230-025-P1-K1-C3
gacacgcatcctctaacagttttcaatgcatcatccaacgttcatagcttggtgtaactaagtgtagtagaggagccactctgaattagtctgctgactttatgctaactgacctacatatgacccaggcggagccggggttacgacaaagttaaaacgcaatcatgcggccaactattacatataactcacctatatgactgccctacacctgatactcaacgagtta

SEQ ID NO: 4456 - DNA, 394 bp, Lilium asiatic
  Clone ID: LIB3230-025-P1-K1-C4
ctcgagtcttccatctcttttcccaaatccagagagacctagggttagggttttccccatcgccggcgaagatgatcgaggtggtgctcaacgatcgcctggggaagaaggtgcgtgtgaagtgtaacgaggacgacacgatcggcgacctgaagaagctggtggcggcgcaaaccgggacccgcgccgagaagatccgcatccagaagtggtacaacatctacaaggaccacatcaccctcagggactacgagatccacgacggcatggggctcgagctctactacaattgaggttcgatgttcgccgattccgtctaattcgcctatttgctagtttgtatgtaaccatgagactggatcttgatgatgatgggttaattggagattcaata

SEQ ID NO: 4457 - DNA, 91 bp, Lilium asiatic
  Clone ID: LIB3230-025-P1-K1-C6
cacttgcaactgcactggcatcagatcctattaaacccaggtctttctgtgcctgctggacaatatgataaaaagtctttacgggtaaaca

SEQ ID NO: 4458 - DNA, 387 bp, Lilium asiatic
  Clone ID: LIB3230-025-P1-K1-C7
cggacgcgtgggttcatttgactctgctattgccggctatatgtctcgctatgaagcaccaaattcatcgagtcacacatcaaacttctgggattctgaggtaacatgccaggcatttccgatacaaaaaaaatcagctgatcagaagacggggacagatccaattaggcttcgtgatatgcttaacctgaatgccgagcataaactgtatgatgatcaaaagactttcaaatgcaatctgcagctccatacagaaggtgatgttgcccctgtcaggactgatgtgtgctctcacacgcagaacaattctcgtaagagaaccattgctgatatgcagcacgattcggaaggttcgtattatgaagttagtggtttggagggcggaga

SEQ ID NO: 4459 - DNA, 393 bp, Lilium asiatic
  Clone ID: LIB3230-025-P1-K1-D10
caggttatttctgatgggtctgaataaatatggtaaaggcgactggaggaacatggcacgcaactttgttgcctccagaacccctactcaggtagctagccacgcccagaagtacttcatcaggcaaaaattcgggtagcaagggccaagcgaggatccagcttccttgaaatcaacacctggaacctccaagagggaaggtcaggctctgcttcccagcagctatcgatgcaggctacatccaccaatgctcccgggacatcggaccaattctccaacatggtcgatgcgattcaacgcaacgaggtcattggtctattctcgcaggcgccttatgggatcaactcttacataatgaaatcgcaggcgcaacattggcataggagtgcgctg

SEQ ID NO: 4460 - DNA, 74 bp, Lilium asiatic
  Clone ID: LIB3230-025-P1-K1-D2
aggttaagggttttttatcaatttgcccccaaatatggtgctaatgtcgatggttacagcccaatttatacccc

SEQ ID NO: 4461 - DNA, 385 bp, Lilium asiatic
  Clone ID: LIB3230-025-P1-K1-D3
caggttatttctgatgggtctgaataaatatggtaaaggcgactggaggaacatttcacgcaactttgttgcctccagaacccctactcaggtagctagccacgcccagaagtacttcatcaggcaaaaatcgggtagcaaggacaagcggagatccagcatacatgacatcaccactgtcaacctccaagaggcaaggccagcctctgcttcccagcagctatcgatgcagtctacatccaccaatgctcccgggacatcggaccaattctccaacatggtcgatgcgattcaacgcaacgaggtcgttggtctattctcgcaggcgccttatgggatcaactcttacataatgaaatcgcaggcgcagcatttgcataggagt

SEQ ID NO: 4462 - DNA, 396 bp, Lilium asiatic
  Clone ID: LIB3230-025-P1-K1-D6
aaacaaacttatttttgggtgggctcagtctccatgatcaacatagggacatgcgaatggacattgataacatgtcttatgaggaattattagccctagaagagaaaatgggtaccgtcagcacagcccttccggaggaggcatttgcaaaatgtctcaagagaagcatttacgctcctgctgcagctctccccggtatttcctgtaatggtgatgatgatatcaaatgtagcatatgccaggaggaatatgttgtcggtgaggagatgaacaagttggtctgcgaacatggttaccatcccgactgcataaatcagtggctgagacagaagaactggtgcccgatctgcaaagcgtctgtatgcccctcttgaggttggcgatatcacaatatgc

SEQ ID NO: 4463 - DNA, 350 bp, Lilium asiatic
  Clone ID: LIB3230-025-P1-K1-D7
ccttacggtactggaggtggaatgagcttggagaacggtctagatgcatctggaagaaaggctaagggtaagggtgtttatcaatttgtcgacaaatatggtgctaatgtcgatggttacagcccaatttataccccagaggagtggtccgaaggaggtgatgtctacgttggagggactactgggctgctcatctgggctgtgactcttgttggaatcctgggaggaggtgctctccttgtgtacaacactagtgccctgtcccagtagtgtgttcatacagatgtataactgttctgtaatctagccggtatctcgtgaattacatagatacttttattctatgtttc

SEQ ID NO: 4464 - DNA, 273 bp, Lilium asiatic
  Clone ID: LIB3230-025-P1-K1-D8
ccttacggtactggaggtggaatgagcttggagaacggtcgtggatgcatctggagggaaggctaagggtaagggtgtttatcaatttgtcgacaaatatggtgctaatgtcgatggttacagcccaatttataccccagaggagtggtccgaaggaggtgatgtctacgttggagggactactgagctgctcatctttgctgggactattgatatgtatcctgttaggaggagctttccttgagtacaacactattgccctataccagtaat

SEQ ID NO: 4465 - DNA, 370 bp, Lilium asiatic
  Clone ID: LIB3230-025-P1-K1-E1
ctttacttcacctttgttctcttctttttcccccaacccccgaacatttttcacagcggttccttgtggtgcttttttttgaacaccccccattttttataaatataatcaattgcttatctatctcttaccttagtttaaccctcatgagctacttattctgtctctgtatctcattgctttacttttggaaattaaatctagagcttacatttgtctcccccctgtaagaattgcatgaaggacggtgtttatttcacgcatgcgagcaaaagctatcaagcaaggaaggaaacgatcatgcacggtggtcctagatctgaagaagatgctggattgctcttatgatgataatgtactatgtgcaatt

SEQ ID NO: 4466 - DNA, 299 bp, Lilium asiatic
  Clone ID: LIB3230-025-P1-K1-E10
tgaggagctttcgaagttgctggggatggtgactattgctaatggtggggtgatgccgaacatccacaaccttcttctgcccaagaaggctggttcgtcaaagtcggcggctgctgatgaggaagcttgagttgtttgttgacctgtgtctctagttgcgtgtggaattatgggtcttgtttgttagatatattctatttttccttgggctgggctttgaatctcttctggacgtgtagtatggaatttagatctggttaagggttctttgttaatgagcagtttcctgttaacagtgg

SEQ ID NO: 4467 - DNA, 272 bp, Lilium asiatic
  Clone ID: LIB3230-025-P1-K1-E11
tgaggagctttcgaagttgctggggatggtgactattgctagaggggtggggtgagggccgaacatccacaacctttttttgccaaaaggctggtcgtaaaatcggcgggtgctgatgaggaaacttgagttgtttgttgacctgtgtctctagttgcgtgtggaattatgggtcttggttgttagatatattctatttttccttgggctgggctttggatctcttctggacgtgtcttatggaatctagatctggttgatgggctctttgt

SEQ ID NO: 4468 - DNA, 386 bp, Lilium asiatic
  Clone ID: LIB3230-025-P1-K1-E12
ctatgtttatatgtcttaagtgtcttagtcctttataagtatgcctttaattgataagtaatctaaatagtagttaaaagatctcatccaaccggttattttttctcttaaaattatgagtagcctagatattctagatctttgaagcagtagttacattagagagataaaatcctgccatattgatttcatgcttacccttttctgaataccttgtactgaatgtatataatcctaaagcttggttctgttacatccttgagacttgttcacatatatgagtagcagttgaaaggttgtgacgaacacattgatagatttaatcagtggttaattttagagacactgaatcatttgagagtcagtaaatttttagaggaaagatg

SEQ ID NO: 4469 - DNA, 158 bp, Lilium asiatic
  Clone ID: LIB3230-025-P1-K1-E4
atgacttctcaaaacattagttatttagggtaagactacaatggggcttttttaaaaaaagatacaactatatctatttttaaattttgtagcctctatattattaccattccaaaaatgagatgtttatttaatacattaataaacattattatttt

SEQ ID NO: 4470 - DNA, 126 bp, Lilium asiatic
  Clone ID: LIB3230-025-P1-K1-E5
aaatattggaaggaagattaaaggtcacttcccgcattctcagttcattgtgggttcgcttaaagaggggttgttcaacaatgcaaatgtcctgttccgaaccaaaattgttgatggagtttcaac

SEQ ID NO: 4471 - DNA, 337 bp, Lilium asiatic
  Clone ID: LIB3230-025-P1-K1-E6
cttttctccacctttctctctccctttctccccaacccccgaccatctccaccgtcgcgccagtggtccctcctcttggaccacccccagatgcggcagagaagatgcaagcgctcagcaccgtcgaacctgagatcaacgctcacgagctcctccttctctctctctatctcattgctttccttttggaaaataaaatatgagcggtcatcatttggctcccccctggaagaattgcatggaggacgggggagatttcacgcatgcgagcaaaagctatcaagcaaggaaggaaacgatcatgcacggagggccgagatctgaaaagatgctggat

SEQ ID NO: 4472 - DNA, 202 bp, Lilium asiatic
  Clone ID: LIB3230-025-P1-K1-E7
ctatgtttatatgtcttaagtgtcttagtcctttataagtatgcctttaattgggggtaatctaaataggggttaaaagatctcatccaaccggttattttttctcttaaaattatgagtagcctagatattctagatctttgaagcagtagttacattagagagataaaatcctggcataatgatttcatgcttacccttt

SEQ ID NO: 4473 - DNA, 247 bp, Lilium asiatic
  Clone ID: LIB3230-025-P1-K1-E8
ctatgtttatatgtcttaagtgtcttagtcctttataagtatgcctttaattgaggagtaatctaaatagtggttaaaagatctcatccaaccggttattttttctcttaaaattatgagtagcctatatattctatatctttgtagctgtatttacattagagagaataaatcctgccatattgaatttaagcttacccttttttgaattacctggtacctgaatgtatataattccttaagcttt

SEQ ID NO: 4474 - DNA, 393 bp, Lilium asiatic
  Clone ID: LIB3230-025-P1-K1-F11
cagatccttctgctaaacccccagcccacttggcagctcgtcctagtgttcctgcgtatcctctttcaatgcttcatatggaaaccgatgatgatatctcgtgcaaagctattggtggggtaactggacagctccttgagcacaactcacaagttttcaatcaaatttcgatgaatcttgcaaactatcagaccgcggagaacattaacttattttgtctaacaagggacaatatatacaaaatcttgaacgacatgaatgacatgccggagataatgaaacagatgccgccactcccggtgaaggtaaacgaagagctcgcaagctccattctgggtaggacaaccatgccaatgcagcagacctgatgtgtatacatgcttttcttccgga

SEQ ID NO: 4475 - DNA, 397 bp, Lilium asiatic
  Clone ID: LIB3230-025-P1-K1-F12
cagatccttctgctaaacccccagcccacttggcagctcgggcgagtgttcctggggatgctctttcaatggtttatattgaaaccgatgatgatatctcgtgcaaagctattgggggggtaactggacagcttcttgagcacaactcacaaggttttaatcaaatttcgatgaatcttgcaaactatcagaccgcggagaacattaacttattttgtctaacaagggacaatatatacaaaatcttgaacgacatgaatgacatgccggagataatgaaacagatgccgccactcccggtgaaggtaaacgaagagctcgcaagctccattctgggtaggacaaccatgccaatgcagcagacctgatgtgtatacatgcttttcttacggagagg

SEQ ID NO: 4476 - DNA, 256 bp, Lilium asiatic
  Clone ID: LIB3230-025-P1-K1-F4
gaattgggaattgtgaagacttatagaagatataaatgaaaagacccatggccattttctggtgggaaaagctataatggcggatatttttctattttaaaccgatggaatcgtccatttagatatataaaaaatgatctattattaaaacgctgtacgtatagtaatttcacaatatattttttatacaagtccaatgtgtgcaaaagataatatttattttactgataccatcaagtttattaactctttctag

SEQ ID NO: 4477 - DNA, 322 bp, Lilium asiatic
  Clone ID: LIB3230-025-P1-K1-F6
gccacccaacttattaatgtaactggtaatgggtacaaacagtcatcaacttccgatatttccgagccagaagaacagagggaactgaactatcgccatgaagagcaacagatagtgctgcctactcgagtgcttctcgtagctcctcttctcggagaggatcaccctcttcatcgtcttcaccaagaacatgcccatacagaagctcatccatggcatcacgaagtagtacgagtaactccagatgagcctcacaagaatggacaaggatagtcccgtaaaagcgtagccaccatatgcgacgatgtcgagcaatggggtc

SEQ ID NO: 4478 - DNA, 396 bp, Lilium asiatic
  Clone ID: LIB3230-025-P1-K1-G10
aaattgcagaaacatttggatttgagcatctaagtgctggtgatttgttgagaaaagaaatatcatctgattgtgaaaatggagcaatgatccgtgagattattacagaaggaatgattgttccatcagaaattacagtcaaattgatccacagaacaattgagtcttccaagaacaacaaattcctaattgatgggttcccacgaagtgatgaaaatagagttgcttttgaaaagataaccggagttgaaccagacatcgtgctattctttgattgcccagaggaggacatggtcaaacgggtattaagccgtaatcaggggagaattgatgataatattgagacaataaagaaacgtctcaaaatttttaacgagttaaatcttcctgttatcg

SEQ ID NO: 4479 - DNA, 174 bp, Lilium asiatic
  Clone ID: LIB3230-025-P1-K1-G11
aaaatgcttatgcataaccctcagaccacttaacagctggtgctatggttccagggggtagactttcaagggttgatatggaaaccaaggttcatatgactttcacagatagtggtgtggtaactggacagatcacagagcacaacttacacagtatcaatcaaatttccaaga

SEQ ID NO: 4480 - DNA, 220 bp, Lilium asiatic
  Clone ID: LIB3230-025-P1-K1-G3
cacacgtccgctcgactttaaagaatcgcttcacatatttaaaccaattttgcatcataaattgggggagagtaacatggagggctacctaataatcatttctatactcttctaaacatgacacaaaattatcaagatagccttaatgagattgtaacaaaagatcgtatgattcctaaaatcaaattgcaatctcaacacacatcaaattttaaaacta

SEQ ID NO: 4481 - DNA, 309 bp, Lilium asiatic
  unsure (1)..(309): unsure at all n locations
  Clone ID: LIB3230-025-P1-K1-G7
cttctcactgctgccaagcacgtcggcaaccaaaacttggtctgactgtgattctcgtaaagaagacaagtcagctgcaggaagatatcactactgagattgttgtgtggtaaccttcctttcctttatgtcacacttctttatttggcgatgcttgggaagcctaagcattaggagggcagtctagtgccttattcttggcttttagaaaaatgattattgcataagttctcatgagccgtgcttgtgtaaaactggacgggaaggcanaatgtgaaccatgacattactagaacaaattcacttttt

SEQ ID NO: 4482 - DNA, 337 bp, Lilium asiatic
  Clone ID: LIB3230-025-P1-K1-G8
cttgtcttttgagaatcgcttcagatttttttaccaattttgcatcatttggtattggagagtatggtttaattttgggtataaattatttcttttctcgataatcatgacacaaaattggcaagttgccttaatgagaatgtaagaaatgatggaatgatttttaaaatcaaatgcaagtgcaacacacacaaatgtaagaactaagtctgaaagtcacccagtaattacaaatgcttgacgcaatcctcaacatcaagaaaaagctggcagtgataatagtcatgccgacgaacatcgatatcatgataatagaaattgggaacaagaaataaaa

SEQ ID NO: 4483 - DNA, 277 bp, Lilium asiatic
  Clone ID: LIB3230-025-P1-K1-G9
gccggaggtaagtttctcttcctctaatttaagcttctcgttgatctggaattgttttgtgtttctttgatgtgcttgcagattgactggtcgtctcgatccttgttgcgactgaatagatctgcgaggttgtatgctcgaatctctgaggttgcggcggggacgagatctgttttcctctctggatctatggcgagctcgatttgcgtattctctctagatctatggcggtctgaaggtatcggctctgttcgcgtattctctctagatctatggc

SEQ ID NO: 4484 - DNA, 414 bp, Lilium asiatic
  Clone ID: LIB3230-025-P1-K1-H1
cccacgcgtccgaattctccgagctctttcgtttctctcgaaggtcctctatggccgctgtagagacagcccccgccgttacaattgagcctccgcctgttgagtctaccttggtggaggggccagccacatcagatgtccctccggtgaagctggccaaggtgaaggccacgaaggctcccaaggaaaggaaggccgtgacgaagaagccggccctacatcctacctatctcgagatgatccgcgaggcgatagcgtcccttaaggagcgaaccgggtcaagccagtacgcgatctcaaagtttgtagaagacaagcacaaggctcaccttccggccaactttaagaagatcctcctcgttcagctggggaaacttactgctgctggcaactcccaaggtcaagaactctaca

SEQ ID NO: 4485 - DNA, 397 bp, Lilium asiatic
  Clone ID: LIB3230-025-P1-K1-H10
gcgaatgtagcaggacttgagcaaagcggaaacatggcagcagctgatgccaaggccaaagctcaggcgactattgatgagataacaaccaagggaggcgagctcagtcaggccactcaggagaagttggcggaggcagtgaagatcctaacggagaagaaggacgagactgtgagctacttgggggagaagaaggaccagacggtgaactatgtcgcagagaagactgaggcagccaagccgaaggagtctgagacggcgccggctgaggagaagaccggcaacttctttcagcaagcgggagaaacggtgaagaacgctctgggaatgggtgaaaagaaagatgataagactgccgagtagctctggatgatgtacctgtgtgctattgattatg

SEQ ID NO: 4486 - DNA, 399 bp, Lilium asiatic
  Clone ID: LIB3230-025-P1-K1-H11
catctagcaagacttgagcaaagcagaaacatggcagcagctgatgccaaggccaaagctcaggcgactattgatgagataacaaccaagggaggcgagctcagtcaggccactcaggagaagttggcggaggcagtgaagatcctaacggagaagaaggacgagactgtgagctacttgggggagaagaaggaccagacggtgaactatgtcgcagagaagactgaggcagccaagccgaaggagtctgagacggcgccggctgaggagaagaccggcaacttctttcagcaagcgggagaaacggtgaagaacgctctgggaatgggtgaaaaagaaagatgataaggactgccgagtagctctggatgatgtagctgctgtgctattgataatgca

SEQ ID NO: 4487 - DNA, 313 bp, Lilium asiatic
  Clone ID: LIB3230-025-P1-K1-H3
ggcaaaggagccgaggttccaagcagtgaaggcgacatagaagaagatacgacagattgatgaagaatatgcattcatgaatgcatgcatgtgtgatggtgtgattacttaggtttaaggtttgtgtgcttatattttgcttgaagcttcctccaccttcagggatggaaggatgtgttgcatggtgtttgtgtgtttcattttacagttgtttgcatgaaggttgtggtggtttgcatgtatttaaattgcacccaagttaatgttaaagtatgattatatcaaattaagattgtaagataattgagctttt

SEQ ID NO: 4488 - DNA, 255 bp, Lilium asiatic
  Clone ID: LIB3230-025-P1-K1-H4
ccaagcgagaaacgtcaaggaaacgatggcgacggcggacgtggagaagccgatggccgccgacaacgctggcgctctgatcgccggtggcgaacactagaggaaccaccggtgaggggctacgccagtactatctccagcacatccacgatctgcagcttcaggttcgtcagaagacccacaacctcaaccgcctcgaggcccagcgtaatgatctcaactcccgcgtgaggatgctaagagaggagctgcaat

SEQ ID NO: 4489 - DNA, 387 bp, Lilium asiatic
  Clone ID: LIB3230-025-P1-K1-H7
cggacgcgtgggtgccaccgtccaccccagcatccctaagcagtgtcctcctccagatccgcaatttctctgcacgttctctctagctttctcgaccgctcacgcgttgggtccattcgtgattgctgaagtaaggatcaagtatccgatcccagctccgaaggtcactagcagcctacatggtgtgatcctccagaagatcaacccaaaggagctccagaaacatgcaactgttaggccctctgtattacatatgctcttggaggtcactaaattctgtgatgtttatctcatggtgagaattcttgatgacgaaagtgaggtcactagcagcctacatggtgtgatcctccagaagatcaacccagaggagctccagaaacatgc

SEQ ID NO: 4490 - DNA, 312 bp, Lilium asiatic
  Clone ID: LIB3230-025-P1-K1-H8
ggcaaaggagccgaggttccaagcagtgaaggcgacatagaagaagatacgacagattgatgaagaatatgcattcatgaatgcatgcatgtgtgatggtgtgattacttaggtttaaggtttgtgtgcttatattttgcttgaagcttcctccaccttcagggatggaaggatgtgttgcatggtgtttgtgtgtttcattttacagttgtttgcatgaagttgtggtggtttgcatgtatttaaattgcacccaagttaatgttaaagtatgattatatcaaattaagattgtaagataattgagctttt

SEQ ID NO: 4491 - DNA, 256 bp, Lilium asiatic
  Clone ID: LIB3230-026-P1-K1-A10
tcgcagtggaatatgcatggattgcttatttactagacgatggttcctgtttatataggggtgtgatcaatgagggtaaattactgccattggagacattggtttagttaagacaagatgtgcagatttaagttaagattgaacatgataggtcatcaaatggactagcatgaggatcattacaagatgactctaaatgagaatgttactacttatgcggtgagtgaggtattacattagatgtcttaattgttgg

SEQ ID NO: 4492 - DNA, 397 bp, Lilium asiatic
  Clone ID: LIB3230-026-P1-K1-A11
cccacgcgtccgcgacggcctcagcaaagatggccgggagcagcgacgaacccgacggacacatcagcaatcctgctacttctctattaaagaccgccgccggcgatccatcgccccacgacgtctcactgttcacccacactccttgctactgtgaggagaatgtgtacttgttatgtaaaaaattatctactcttggtcttgccgagccaatggggagagacctttttgttgtatttatatccaatgagaagaagcaggttccattgtggtgtcaaaaggcaagcaaaagaatggatggcttggtgatatgggattatcatgttatctgcattcagacgcaaagaaacggagaaaccagccctcacgatctggtatgggatttggattcaactct

SEQ ID NO: 4493 - DNA, 375 bp, Lilium asiatic
  Clone ID: LIB3230-026-P1-K1-A4
ccagccctggagacgatcccgatgaagtaaaagcaaggctgaagtattgggctcaagctgtggcttgtactgtgagactatgcagctgacattggttgtatcctatatgcggtaaccagcagcatgaatattgactaaattcctcttccattgttaatccactcaacacctgcaagtctttctagaggaacgagatcaatggcgggataaaaagaaatgtctagaaggaagaggaaggaggagaagcaaactgggaacatcctctgtctaaaatcaaatgagtaacatgtctgacctctgcattgcccacaaaagggtattaatgcttttgtttcatgtacaatatttaagatgagtaaatgtgtttcttcttcc

SEQ ID NO: 4494 - DNA, 291 bp, Lilium asiatic
  Clone ID: LIB3230-026-P1-K1-A5
ccagccctggagacgatcccgatgaagttaaagcaaggctgaagtattgggctcaagcgggggcttgtactgggagactatgcacctgacattggttgtatcctatatgcgcgaaccagcagcacgaatatcgactaaattcctcttccattgttaatccactcaacacctgcaagtctttctagaggaacgagatcaatggcgggataaaaagaaatgtctagaaggaagaggaaggaggagaagcaaactgtgaacatcctctgtctaaaatcaaatgagtaacatgca

SEQ ID NO: 4495 - DNA, 358 bp, Lilium asiatic
  Clone ID: LIB3230-026-P1-K1-A6
ggcggcgaggttggcgccgccagctccctcgcccccaagatcggtccccttggcctctcccccaaaaagatcggcgaggacatcgccaaggagaccgccaaggactggaagggcctccgcgtcactgtcaagctcacagtccagaatcgccaggccaaggtcaccgtcgtcccctccgccgcggccctcgtcatcaaggcgctcaaggagccggagcgcgaccgcaagaaggtgaagaacatcaaacattccggcaacatctcgctcgacgatgttgtggagattgcgcggatcatgaggccgcgatcgatggcgaaggagctggcggggacgattaaggagattctggggacgtgtg

SEQ ID NO: 4496 - DNA, 383 bp, Lilium asiatic
  Clone ID: LIB3230-026-P1-K1-A7
cagccagctccccaccacagtttctcagaggaagtcgctgtgctcgacaaatacttcggtcacctccagtctggtggaaatgcttacatgattggtgatcctgttatgcctgaacgcaactggcacatctattatgctactgacaagcctgagaagcccatggtgactcttgagatgtgcatgactggcctgagcagcgacaaagcatctgtcttcttcaagagttctgctgatggccacactcgctcggccaaggagatgactaatgtttctggtatctcaaacatcatccctgagatgaatatatgtgactttgaatttgacccctgtgggtactccatgaatgggattcatggttcggctctatcaaccattcatgtgac

SEQ ID NO: 4497 - DNA, 390 bp, Lilium asiatic
  Clone ID: LIB3230-026-P1-K1-B10
cctccctacatccgcaaccgcagatgagcaagcgagcagcgcaccgactgaagaacaacagatagatgctccaaatactgatattgtggctcttgctgaggagctccctgacgaaccacctgaagatggagctcatgttcgtatgaatgctgctgcaggccgtctgagggtcagcttcagtgctggggtgaggttctcaagaagagagcctgcagcggaacaacaacaggcaccagtccttaatgctccgaggcgaatggacgaccgcttgtttaccctggcggcggttgcactgaccattgccatcatggtccttgtagtgaagaagttcctgaagtccaatgggattgctggctacttcgatgactcaccttttgagatgtgagagtg

SEQ ID NO: 4498 - DNA, 394 bp, Lilium asiatic
  Clone ID: LIB3230-026-P1-K1-B11
cctccctacatccgcaaccgcagatgagcaagcgagcagcgcaccgactgaggagcagcagatagatgctccaaatactgatattgtggctcttgctgaggagctccctgacgaaccacctgaagatggagctcatgttcgtatgaatgctgctgcaggccgtctgagggtcagcttcagtgctggggtgaggttctcaagaagagagcctgcagcggaacaacaacaggcaccagtccttaatgctcccaggcgaaatggacgaccgcttgcttacctgggcggcggttgcactggccaatgccatcatggtccctgtagtgaagaagttcctgaagtccaatgggattgctggctacttcgatgactcaccttttgagatgtgagagtgaag

SEQ ID NO: 4499 - DNA, 396 bp, Lilium asiatic
  Clone ID: LIB3230-026-P1-K1-B3
gaagttatagttataatgtactgcaattttgatacttttgctaacaagatattatatttagacacttgaaatgctggagaaaagggagaaggtttttctaaagaaggctcatgctgaaatggaaaaggccaaagaattcacccaacagaaaaacaaaagagctgcgatacaatgtctgaagaggaaaaagatctatgagcaacaagttgagcagcttggaaatcatcaattacgaattcatgaccagatgattatgatagaaagtgcaaaagctacgacagagaccgtaggtgccttgagaactggagcggcagtaatgaaagctatgcagaaagcaactaacattgacgacgttgacaagactatggatgaaataaatgagcaaacagagaacat

SEQ ID NO: 4500 - DNA, 397 bp, Lilium asiatic
  Clone ID: LIB3230-026-P1-K1-B7
ggtggcaatacatgcattggagctcattgttacagactcgtgtttgtcatcatgtcctttgcctgtgttattggattcgggctggatgtcctgttggcattgcgaaccagaagactttacatgaagctatgctctagcaagaagtcgaagaaaacaatgaaagctcctcgtctcttataaagaggtaaatctatcattttattctataggtaacagtcttttggtacatttacgaccgagacttcaaaaataatgtgagttctcagctcttatcactctttgtgaatggtactgtagccttaacacctgcctgagtattagctggtttagttgaggatgatgtaactatagaaacaatgttatttttccacagatttacccattttaaagatccttt

SEQ ID NO: 4501 - DNA, 405 bp, Lilium asiatic
  Clone ID: LIB3230-026-P1-K1-B8
gtgatgctagttctctgagaaccgtagctacaaaggtaacgggaggttggctaattgatggccaaaaacgctggatagggaacagtacttttgctgatgtattggttgtttttgctcgcaacaccagcacaaaccagataaatggatacattctgaagaaaggtgccccagggttgaatgtaactaaaattgaaaataaaattggcctaagaatggtccagaatggagatattcttatgaataaagtatttgttcctgaggaagacaggcttccaggagtgaattcttttcaagacacgagcaaggttcttgctgtttcacgtgttatggtcgcatggcaaccaattggtgtatcgatgggtgtgttcgatatgtgccacaggtatctgaaagagaggaagcaat

SEQ ID NO: 4502 - DNA, 403 bp, Lilium asiatic
  Clone ID: LIB3230-026-P1-K1-C1
gatcgccggagatgggtcgggccgtgtcggagacgtgcatggacggcatgattatcgagatggtgtcggcgtactccacccgcttctacgccaccaagcccgagctcgccgcccgccgaatcgaggccatcggttaccaggtcggccatcagctctccgagaggtacacaatggacaggcctcgattcagcgatcatctagaagcaatcaaattcatttgcaaagacttttggtctgagcttttcaagaagcagattgataatctgaaaaccaatcatcgtggtaccttcgtgttgcaagataatcacttccgttggctgaagcgaatatcgattgatccctcagcagagagcatcgacgtgcctcaacaggagtcttctgcttctgcagcagagggcaaggg

SEQ ID NO: 4503 - DNA, 375 bp, Lilium asiatic
  Clone ID: LIB3230-026-P1-K1-C10
ctctactaaagcttcagtctctcatcaatcatgtctgggcgaggaaagggagggaaggggctcggcaagggcggcgccaagcgccaccgcaaggtgctgcgggacaacatccagggcatcaccaagccggccatccgccgcctggctcggcggggtggagtgaagaggatcagcggcctcatctacgaggagaccagaggtgtgctgaagatctttctggagaacgtcatccgcgatgccgtgacctacactgagcacgcgcggcgcaagacggtgacggcgatggatgttgtgtatgctctcaagcgccagggccgcaccctctatggatttgggggttgatctagcactgttctcttctcttctgggtttggg

SEQ ID NO: 4504 - DNA, 338 bp, Lilium asiatic
  Clone ID: LIB3230-026-P1-K1-C11
ctctactaaagcttcagtctctcatcaatcatgtctgggcgaggaaagggagggagggggctcggcaagggcggcgccaagcgccaccgcaaggtgctgcgggacaacatccagggcatcaccaagccggccatccgccgcctggctcggcggggtggagtgaagaggatcagcggcctcatctacgaggagaccagaggtgtgctgaagatctttctggagaacgtcattcgcgatgccgtgacctacactgagcacgcgcggtgcaagacggttacggcaatggatgatgtgtatgctttcaagcgccagggacgtaccctctatggatatggggg

SEQ ID NO: 4505 - DNA, 375 bp, Lilium asiatic
  Clone ID: LIB3230-026-P1-K1-C12
gatggaagaagaatatatcgagaacatctgtgtgcagatattgaagttcaaacctgacttggttataactgaaaaaggtcttagcgatcttgcatgccattacttcagcaaggctggagtgagtgctatcaggagggtgagaaagaccgacaacaaccgtattgcaaaggcttgtggtgcggtgattgtcaacaggccagaggaactgcaagagtctgatgttggaaccggggcagggctttttgaggtgaagaaatttgcggatgagtttttctcattcatcgttgactgcaaagatccaaaagcctgtactgtacttttaagaggtgctagtaaggatcttttgaatgaagttgaaagaaatttacaggatgc

SEQ ID NO: 4506 - DNA, 381 bp, Lilium asiatic
  Clone ID: LIB3230-026-P1-K1-C2
gatcgccggagatgggtcgggccgtgtcggagacgtgcatggacggcatgattatcgagatggtgtcggcgtactccacccgcttctacgccaccaagcccgagctcgccgcccgccgaatcgaggccatcggttaccaggtcggccatcagctctccgagaggtacacaatggacaggcctcgattcagcgatcatctagaagcaatcaaattcatttgcaaagacttttggtctgagcttttcaagaagcagattgataatctgaaaaccaatcatcgtggtaccttcgtgttgcaagataatcactttcgttggctgaagcgaatatcgattgatccctcagcatagagcatcgacgtgccttattaggagtcttctg

SEQ ID NO: 4507 - DNA, 374 bp, Lilium asiatic
  Clone ID: LIB3230-026-P1-K1-C7
gatcgccggagatgggtcgggccgcgtcggagacgtgcatggacggcatgattatggagatggtgtcggcgtactccacccgcttctacgccaccaagcccgagctcgccggccgccgaatcgaggccatcggttaccaggtcggccatcagctctccgagaggtacacaatggacaggcctcgattcagcgatcatctagaagcaatcaaattcatttgcaaagacttttggtctgagcttttcaagaagcagattgataatctgaaaaccaatcatcgtggtaccttcgtgttgcaagataatcacttccgttggctgaagcgaatatcgattgatccctcagcagagagcatcgacgtgcctcagcaggag

SEQ ID NO: 4508 - DNA, 361 bp, Lilium asiatic
  Clone ID: LIB3230-026-P1-K1-C9
gcctgcagtggctatgaatggagtagatgatgtatattgtagagtagagatagtaaggtgcttagtagaggcagtgggttgctggaatgatgaagaaggctacggagcagtgggcaggatggtggcaatagcttggcatgaagatggagctgccactgtcagtattttatccacttgtgccgagtcgagcttataactctcaagactctacaagaggatacttctcctggttccaaagggccacctcgaggaacaagggagaatagcgttgagtaggtagagagaatggagaaggtctcgcttaatgatgagggagaaaacttttgaacaggaaagttgaggaagacacatgtaagaaaag

SEQ ID NO: 4509 - DNA, 346 bp, Lilium asiatic
  Clone ID: LIB3230-026-P1-K1-D10
gagtccagatgcctttagtgtcatcgagacgatgcaattctcaagtattgcaggtgctcgcagtccccatggctttcctaatttctttcaagaattcttcggagctcaggatctaaatccctccatgaactagttccttttgaggcgcatgagttaccacttcaagaagatgagacagttatgcaccacatgactaatttgtgtggggtaagggatttatcggatgagagtaacaaccaaagtgagacctatagcaatattatgcacttcgaagctagcaatagaagcctgcttgcgggttctttgtgtttgagcgcagttttagaagaccttttcgtggttgaag

SEQ ID NO: 4510 - DNA, 367 bp, Lilium asiatic
  Clone ID: LIB3230-026-P1-K1-D11
cggacgcgtgggatcgacaccgccggtgtggttgccctcttaggcgcccacagtgttgggcggacgcactgcgtgaagctcgtgcaccgcctctacccggaagtagacccagagctgaacccggaccatgtaccacacatgttgaagaagtgtcacactgagatcccggacccgaaggcggtacagtacgtccgcaacgacaggggcacgccgatggtgctggacaacaactattaccgcaacatccttgacaacaaggggctcttgctggtcgaccaccagctcgcctatgataagcgcactcgcccatatgtgctgaaaatggcgaagagccaggagtacttcttcaaggagttcagcaggggca

SEQ ID NO: 4511 - DNA, 371 bp, Lilium asiatic
  Clone ID: LIB3230-026-P1-K1-D12
cggacgcgtggggccttctcttattgtgtctgctagcaaggacgagtctgttcgtctatggaacgtgcacacaggtatatgcattttgatatttgctggagctggaggccaccgcaacgaagttttaagtgttgactttcatccctcggatatttatcgcatagccagttgtggcatggataacaccgttaagatttggtcaatgaaagagttctggacatatgtcgagaagtcttttacatggacggaccttccgtcgaagtttgcaacaaaatatgtccagtttccagtgttcacagcttcagtgcactcgaactatgtggactgcaatagatggcttggtgatttcatcctatccaagagtgttgaca

SEQ ID NO: 4512 - DNA, 406 bp, Lilium asiatic
  Clone ID: LIB3230-026-P1-K1-D2
cctccccccgcctcctccccccgccgccgcctatctccagctccggagccgccgcctcgagaagcccctcgccctccagcccttggagccgccttgcaaggatacccccagatccacccctagccctagcccctatcccagctccagatctgcccacagccggtcgggctcagtgtcagtcaggagctgctgctccaagagaccggagcccgctgtctcgccggaggtttccttcggggaaaatgtgcttgatgtcgaagaaaggggaaggaaaaccagagaaaccacaccttgcagtttgatacgagattcagatactattgctactccgggctccacaaacaggcccaggccgacctacgccaacactaggagaatcccgaattcggcacccaaaaacatccca

SEQ ID NO: 4513 - DNA, 387 bp, Lilium asiatic
  Clone ID: LIB3230-026-P1-K1-D3
cggacgcgtgggtgtgacgaatccaaatttttgtaaaacccttgcccggaaaaacgaataaccctcaaggtccaaaaccagccacaccattccataattgcaaggcgaagatccaagacaaggaagggatttcgccttatcaacagcgtctgatctttgcttggaagcaacttgaagattggccgacgcttgccgattattatattcacaaagagtccacgcttcatcttgtgcttaggtttaggggtgggattatcgagccttctctgatggcgctggcgaggaagtataatcatgagaagatgatctgttggaagtgctatgcccgtctgcatcccaaggctgtgaattgccggaaaaagaagtgtggccacagcaaccagctga

SEQ ID NO: 4514 - DNA, 395 bp, Lilium asiatic
  Clone ID: LIB3230-026-P1-K1-D4
cttacgcatggttttcacaatgcccatcttttttcttacccttgcccagcataacaaggggcctctatgcctatgtgggggactccatcaatactgccaacaaaaaaatccactacagttaaggaattccgcctattaattactgtttgacctcccctgctcccttccttaagccttttctgcccttagctttttatattccccataaacagtcgactcctctttttaatcttcggttccggttattattttcaaaccatttcctgatgaacttttcacaatttatcttatacctgaaataatccaaaagcctttacttttcttttaagaggtgcttagtaagatcttttgaatgaagttgaaagaaatttacaggatgctatgtctgtagcaag

SEQ ID NO: 4515 - DNA, 373 bp, Lilium asiatic
  Clone ID: LIB3230-026-P1-K1-D7
cggacgcgtggggccttctcttattgtgtctgctagcaaggacgagcctgcaggggtatggaacgtgcacacaggtatatgcatttcgatatttgctggagctggaggccaccgcaacgaagttttaagggttgactttcatccctcggatatttatcgcatagccagttgtggcatggataacaccggtaagattcggtcaatgaaagagttctggacatatgtcgagaagtcttttacatggacggaccttccgtgggagtttccaacaaaatatgttcagtttccagggtgcacagccttagttgcctctaactatatggactgcaagagatggcttggtcgataacattccaatcaagagcgtttacat

SEQ ID NO: 4516 - DNA, 335 bp, Lilium asiatic
  Clone ID: LIB3230-026-P1-K1-D8
cggacgcgtggggccttctcttattgtgtctgctagcaaggacgagtctggtggggtatgtaacgtgcacacaggtatatgcattttgatatttgctggagctggaggccaccgcaacgaagtctcaagttgcgactttcatccctcggatattaaattgatagccaggtgaggcatggataacacttttaagattttgacaatgaaagagttttggacatatcacaagaagtctctttcatagactgaccatccgttgaagtttacaacaaaaaatatttagttttcagtgattatatctttatttaacttaaactatgatgactgcaatagaa

SEQ ID NO: 4517 - DNA, 393 bp, Lilium asiatic
  Clone ID: LIB3230-026-P1-K1-E10
ctgctggtgcgtacaaggttgcggcggtcaaccggaagaggccatcaatccgtgcgctctccagacaaaagcttcctcagcttccaggaacatcaattgaaggagttgagaagggaggctatattatttcagacaactcgtctgggaacaaacctgatgtaatcctcattggcactgggtctgaattggagattgctgccaaggcaggcgatgagctgaggaaggaaggaaaggcagttagggttgtatcgcttgcttgctgcgagctgtttgaggagcagtcggctgaatacaaggagagcgttttttctgctgcggtcactgccagagtgagcattgaggctgggtcgacacttgggtggcagaaataccttggagacaagggcaaagcga

SEQ ID NO: 4518 - DNA, 385 bp, Lilium asiatic
  Clone ID: LIB3230-026-P1-K1-E11
cggacgcgtgggcagacggcggcgatggcatggcgggcgagcctgtctcggagtgtaaaggagatacgcgtcctcttctgccagtcctcccccgctagcgcccccgcccgggagttcgtgaagaagaactatggtgacatcaaggcccgcaacccctccctccccttccttgtccgcgagtgctccggtgtccagccccagctctgggcgcgctacgatatgggtgtggagagatgcgtgaacttggatggtctgacggaagcacagattgataagaagctggaggaacttgcaatggccggggagtctcttaaaaccaaatagttttggaactcgtatcatgtcttggttaaaggttccaaattaatagatactcctaccatat

SEQ ID NO: 4519 - DNA, 398 bp, Lilium asiatic
  Clone ID: LIB3230-026-P1-K1-E12
ggcgtgaaggacaccacccagatccatacccatatgtgctacagcaacttcaatgacatcatccattcgatcatcgacatggacgcagatgtgatcactattgagaactctcgctccgatgagaagctgctgtcggtgttccgtgagggagtcaagtatggcgctggtatcggcccgggtgtttacgacatccattcccccaggatcccgtcgaccgaggagattgctgacaggatcaacaagatgcttgctgtgctcgagaccaacatcctctgggttaaccctgactgcggtttgaagacccgcaagtatgctgaggttaaacctgcgctgaccaacatggttgaggctgcgaagaagcttcgcaccgagctggcgagtgccaagtgagttgcacc

SEQ ID NO: 4520 - DNA, 404 bp, Lilium asiatic
  Clone ID: LIB3230-026-P1-K1-E2
cggacgcgtgggcggacgcgtgggcggacgcgtgggagccagtacgctatttcaaagtttgttgaggacaagcacaagtctcatctcccggcaaacttcaagaagcttctccttgtccagttgcggaaactcaccgctgctggtaaactcaccaaggtgaagaactcctacaagatctctgccaaaccaacctctgctgcgatgtccaagtctgcagccgtgaagccgaagtctgccgctgctaagcccaagttcggtgccaagaaggtgaagaagcctgctgtgaagccaaagccgaaatcagctgctgtgaagccaaagcctaaattctctgctgtgaagcctaaagcccctgctgcgaagccaaaatccaagcctgctgccccgaaggcgaagacaatgac

SEQ ID NO: 4521 - DNA, 400 bp, Lilium asiatic
  Clone ID: LIB3230-026-P1-K1-E3
aaaattaagaatcccaactacaaggggaaatggaaggcacctatgattgacaaccctgatttcaaggatgatccttacatttatgcttttgacaatctgaaatatgttggcattgagctatggcaggtgaaatccggaacattgtttgacaatgttctagttgctgatgaccctgaatatgcaaagaagcttgctgaagaaacatggggaaagcagaaggatgctgagaaggccgcatttgatgaagctgagaagagtaaaactgaggaggagtcgaaggatgatgatgatgctgatatagatgatgaagatggttttgatgatgctgatgcagcggatgaggatagtgatctagagaaggaagaggatgctcatgatgagctctagatggaaggcagat

SEQ ID NO: 4522 - DNA, 399 bp, Lilium asiatic
  Clone ID: LIB3230-026-P1-K1-E4
cggacgcgtgggtggatttattatggtctgacccaactgagaatgatagcgtagaagggctacgtccaaatgctagaggcccgggattggttacatttgggcccgaccgtgtcatggagttcttcaataacaatgatctgcagctgattgtccgtgcacacgaatgtgtgatggatgggtttgaacgttttgcacaaggacatttgattacccttttctctgcaactaattattgtggtactgcaaataatgccggggcaatcttagttttggggagagacctagtagttgttccaaagctgattcatccgctaccgcccgctattacttcacccgagaattcaccggagcgtcatattgaggatacatggatgcaggagcttaactcggacagaccac

SEQ ID NO: 4523 - DNA, 333 bp, Lilium asiatic
  Clone ID: LIB3230-026-P1-K1-E5
cggacgcgtgggtggatttattatggtctgacccaactgagaatgatagcgtcgaagggctacgggcaaatgctagaggcccggcattggttacatttgagcccgaccgtgttatggtgttcttcaataacaatgatctgcagctgattgttcgtgcacacgaatgtgtgatggatgggttcgaacgatctgcacaaggacatttgattaccgttttctgttgatctaattattgtggttctgcaaataatgccggggcaaatcttagttttggtgagagacctatgtgttgttccaaagctgattcattctttaccagccgatattactgca

SEQ ID NO: 4524 - DNA, 275 bp, Lilium asiatic
  Clone ID: LIB3230-026-P1-K1-E7
ggcgcgcaggacaccacccagatccatacctatatgtgcgaccccaacttgggggggatgatccatccgagcactgtcatgcactcatatgtgattagtatcgacaactcttcggtccgatgagaagctccagcgggtgttccatgcccgagtcgagtaagaccctgtacttggcctgtgggaacacaacatccattcccccatgatcccggctacgatgtgattgctgtcaggagcaacaacatgcttgctctgctcgagaccaacatactttt

SEQ ID NO: 4525 - DNA, 403 bp, Lilium asiatic
  Clone ID: LIB3230-026-P1-K1-E8
gcgatgacacagagaccgaagctcctttggaggaagagcagggagaggaagttgatacacctgaatctgagcgtcctaaaaagcaaagtaggaagtcattagagaaaaaaggtgatgatacagagaccaaagccgctttggaggaagagcagggagatgatgttcaaatgcatgatacagaagatgctgttgctgaggtggcgacagaggtgaaagccgctgaagaaactcccgttgaagaaactcctgagctgaacaaaaatggatgatttacgtgccccagtagcttcgtttggtgatgttgtgaaggagtctatgcacgatgattctgtagagaccaagaaggatgatactgtcgccgaaagtactacagaagaaattcctatttctgatactataccat

SEQ ID NO: 4526 - DNA, 285 bp, Lilium asiatic
  Clone ID: LIB3230-026-P1-K1-E9
ccggggcgagccacgcgtccggcgatgacacagagaccgaagcttttttggaggaagagcagggagaggaaggggggacacctgaatctgagcggcccaaacagcaaagaaggaagacattagagaaaaaaggcgatgagacagagaccaaagccgcatgggaggaagagcagggagatgatgctcaaatgcatgatacagaagatgctgctgctgaggaggcgacagaggtgaaagccgctgaagaaacaggcggagaagaaacgaccgagcagaacaaaaacg

SEQ ID NO: 4527 - DNA, 398 bp, Lilium asiatic
  Clone ID: LIB3230-026-P1-K1-F1
cggacgcgtccgcccacgcgtccgccctgcgtccgcccaggccaacatcaagctcaacaacttcaccgaggcggttgctgatgcgaaccgagcgatcgaattggatcgggctatggccaaagcttacttgagaaaaggcaccgcttgcattaagctcgaggagtatcagactgcgaaggtcgcacttgaggcaggtgtttcgttggcacccggggattctagatttactagattgattaaggagtgcgacacacaaattgctgcggaaacaaacaatcttcccaaagctccaccaagttccttgactccttcggtgaataaaactaatggtagcacagaagattctgggtcatctgcacatgatgcatctaaggttgctgcggtctcaaagcccaaat

SEQ ID NO: 4528 - DNA, 383 bp, Lilium asiatic
  Clone ID: LIB3230-026-P1-K1-F2
cggacgcgtgggtccgtccagagaaaacctacttcggcaacaaaggcttcaaatgagcccttgaagcttactcgggaatctacggataatagaagtcaaagagcagatgcaaaagattgtgctttggatcctttcactaagctgaaggacagatttctaagtttcaaaaaggaaaactttatggaggatctgacgcactatcaaaaccttgccgaaggtcaagcacccgagtttatggtgattgcatgtgcggattcgcgagtttgcccatcaagaatattgggatttcaagcctggggagggcctttatggttcggaacatcgcaaaattgggttccccatttgagcatggggcttccgaaactactgcagcactcgagttt

SEQ ID NO: 4529 - DNA, 399 bp, Lilium asiatic
  Clone ID: LIB3230-026-P1-K1-F3
cggacgcgtgggtccgtccagagaaaacctacttcggcaacaaaggcttcaaatgagcccttgaagcttactcgggaatctacggataatagaagtcaaagagcagatgcaaaagattgtgctttggatcctttcactaagctgaaggacagatttctaagtttcaaaaaggaaaactttatggaggatctgacgcactatcaaaaccttgccgaaggtcaagcacccgagtttatggtgattgcatgtgcggattcgcgagtttgcccatcaagaatattgggatttcagcctggggaggcctttatggttcgaaacatcgcaaatttggttcccccatttgagcatggggcttccgaaactactgcagcactcgagtttgctgtcaattctctagag

SEQ ID NO: 4530 - DNA, 401 bp, Lilium asiatic
  Clone ID: LIB3230-026-P1-K1-F4
cttcagtcaggatcagatattcagaatactaatttgttgatcgagacggttccctctagtgactccgtacttgtaatggaaaaggaagcttctcaggaagcggagctctcaacttgtaagcaatcagctagttcgatggatacatctgcctgtgcgaatggcgtggaaggccttttttctctgcatccgtgtgttacagatgccatgcttgtgagtaatgcttctacagtgtgtaaatcggtaactccaggacggcaagcatcaccagaagccataacatcgtggaagaaaaacggctttactagcttgatagttgctgcaccagaaatggaggtgggcaacatacttcaaaaactgctgccacttttatcatattctgctccatttgcggtttatcacca

SEQ ID NO: 4531 - DNA, 398 bp, Lilium asiatic
  Clone ID: LIB3230-026-P1-K1-G10
cggacgcgtgggagctgattggagccgcccagacagtttcgatggctcggtcggtgtatctctacatccctaatatcatcggatatataagagttcttatgaacattgtcgcttttgctctttgcttttccaacaaatggctatttgccatcctttacttcatcagttttgtttgcgatggggtggatggctggtttgcccgcaagtttaatcaagtgtctacctttggagctgttttggacatggtaacagacagagttagcactgctggtttattggcaattctatcccagttatatagtcctggtcgaactttcttggcattgcttggactggatattgctagccattggttgcaaatgtacagtacatttgtatctggcaaaactagtcacaaa

SEQ ID NO: 4532 - DNA, 348 bp, Lilium asiatic
  Clone ID: LIB3230-026-P1-K1-G11
cggacgcgtgggagctgattggagccgcccagacagtttcgatggctcgggcggggtatctctacatccctaatatcatcggatatataagagttcttatgaacattgtcgcttttgctctttgcttttccaacaaatggctatttgccatcctttacttcatcagttttgtttgcgatggggtggatggctggtttgcccgcaagtttaatcaagtgtctacctttggagctgttttggacatggtaacagacagagttagcactgctggtttattggcaatttctatcccagatatatagtcctggtcgaactttcttggcattgcttggcctggatattgctagc

SEQ ID NO: 4533 - DNA, 399 bp, Lilium asiatic
  Clone ID: LIB3230-026-P1-K1-G12
ggtgattcacttaatcggaacatgtgggagtctctggtttgtattttgagaaactctgtgaaggacaagaagagggtgttcgaggcctcgggcaggagtcatttcaagacggagggatcttactctttcgtattcaaggactatggctgcactgtggagtatttccgatcaccttttcttgttcaagaatgggagatgccggacaataatgggtcgaagaaggaaacactccggctcgacatagttgagaaatcggcttctaattacaaggatgcatatgctatcatcttcaacaccgggcattggtggactcacgacaagacggcccaagggaaagattactaccaagaaggcaaccatgtgtatagtgagctgaacgttgcggaagctttccgtaaa

SEQ ID NO: 4534 - DNA, 386 bp, Lilium asiatic
  Clone ID: LIB3230-026-P1-K1-G4
caacggagagctgttactctcatatggctttgttccaaaagagggcacaaacccatatgattcagttgagttggcactatcacttgacaaagctgacaaatgctacaaagaaaaactaggagctttaaggaagcacgggttatcatcacctcagcggttccccctgcagataagtggctggccgttggaaatgatgtcatatgcctacctcgtagtctgcccaccaactatgagtcaacaatatgaggagatggctgctgctgcctctaatacaagtatgtctaagtctggaatgagttaccctgaactagaggagcaaactctacagttcatcttggattgttgtgaattgagcatatcaaaatacaataaattcttacagggag

SEQ ID NO: 4535 - DNA, 394 bp, Lilium asiatic
  Clone ID: LIB3230-026-P1-K1-G5
caacggagagctgttactctcatatggctttgttccaaaagagggcacaaacccatatgagtcagttgagttgtcactatcacttgacaaagctgacaaatgctacaaagaaaaactaggagctttaaggaagcacgggttatcatcacctcagcggttccccctgcagataagtggctggccgttggaaatgatgtcatatgcctacctcgtagtctgcccaccaactatgagtcaacaatatgaggagatggctgctgctgcctctaatacaagtatgtctaagtctggaatgagttaccctgaactagaggagcaaactctacagttcattttggattgttgtgaattgagcatatcaaaatacaataaattcttacagggaggtggtagt

SEQ ID NO: 4536 - DNA, 374 bp, Lilium asiatic
  Clone ID: LIB3230-026-P1-K1-G7
gcaggacaagaggaagaagatgacgacgtagctggtgagaattggggtgaaactgatttggatattgatgccattgaccaggtaattcagaacggagatgttcaaatagaagttgaggacgatgaagaaaacgttgggaatgacgaggaaggaggatgggagcttgaagacttggagttgccacctgatgtggatacaccaaaagctccagggcatagccgtgctattgtattcgttgctcctactccaggcatgcctgtaagtcaaatctggatccagaaatcatctcttgccggggagcatgcagcggctggaaatttcgacactgcaatgcgcttgcttagccgacaactaggtataaagaactttgaacc

SEQ ID NO: 4537 - DNA, 343 bp, Lilium asiatic
  Clone ID: LIB3230-026-P1-K1-G8
aggatgtcatgcaatttttaattctccggggacatagtcgacttgttcctcaaggtggaatttctgagtttcctgatgctatactcaatgcgaagcgccttgatctttacaatttgtacagggaggtggtttcaagaggaggcttctatgtgggaaatggcataaactggaaaggccaggtcttctcaaagatgcgaaaccatacagcaacaaacagaatgactggtgttggaaatacattgaaaaggcattatgagacgtacctgttagagtatgaactagcccatgatgatgtagaatggggaatgttgtttgctatgccacagtagcgcacctggggact

SEQ ID NO: 4538 - DNA, 347 bp, Lilium asiatic
  Clone ID: LIB3230-026-P1-K1-G9
tctcaattcactcaacagcggctgcagcattgccactcatatggtgatcggcagcaaccgatgcagtctccacaatctcagccgcagcagctgctgcaactacaacaccagcaacatcaacaattacagcatcaccaccaccaagcagcagaacagttttctaatcatcaggggatccctaacgcaatgtcatccccgtcagagttgacgggctctcaatctcagtcaacgcccttgaatacaataacatcgttttcccaccagaactttccagataccaatgttaacccagtgtcaacaatctgctctctctttcttgcattggattttgggatcatattctcacg

SEQ ID NO: 4539 - DNA, 396 bp, Lilium asiatic
  Clone ID: LIB3230-026-P1-K1-H1
gtgatggaaatattccaacttcgagagtacttactggacataagggttacgtatcgtcgtgccaatatgcccaggatactcgcctaatcaccagctcaggggatcagacatgtgtgttatgggacgttactacgggccaaagaatttctgtttttggaggtgaattcccgtcaggacacacagctgatgtattgagtgtctccatcaacaatgcgaatcccgacatatttgtctcaggttcgtgcgataaaactgcacgtcttttgggatatacgtattgcttctagggctacacgaacatatcacggtcacgatggggatgttaacactgtcaagttcttcccagatggacaaaggtttgggacttgctctgatgatggtacatgtaggcttttt

SEQ ID NO: 4540 - DNA, 401 bp, Lilium asiatic
  Clone ID: LIB3230-026-P1-K1-H10
caaatccctcttcccctctttttcaactaaaatcttcaatggctcccaaggctgagaagaagccggtggcagagaagaagccggccgaggaggagaagaagtcggtccctgcggagaagaagcctgccgagaagaagcccaaggcagggaagaaggtcccggcctccaaggagggggcttctgacaagaagaagaagaggtcgaagaagtcagtggagacctacaagatctacatcttcaaggtgctgaagcaggtccatccggacatcggaatctccagcaaggccatggggatcatgaacagcttcatcaatgatctcttcgagaagatggcacaggagtccgcccgcctcacccgctacaacaagaagaacaccatcacctcccgggagattcagacc

SEQ ID NO: 4541 - DNA, 350 bp, Lilium asiatic
  Clone ID: LIB3230-026-P1-K1-H11
cccggtcgaccacgcgtgcgtccgaaatcctcttccctctttttatacttaaatctgaatggctcccaagggtgggaagaagccggtggcagagaagaatccgaccgcttaggaaaaaaagttcttccctgcggagaataagcctgccgagaataagcccaatgcagttaacatggttcctgtctccaaggagggggcttttgtcaagaaaaagaaaaggtctataaattagtggattacctacataatctacattttttaagtttttaaacatgttcatttttacttttgaaatttcattatggtcattggggtttaagaacagttttttttaattattttttttgaga

SEQ ID NO: 4542 - DNA, 373 bp, Lilium asiatic
  Clone ID: LIB3230-026-P1-K1-H12
ggtgattcacttaatcggaacatgtgggagtctctggtttgtattttgagaaactctgtgaaggacaagaagagggtgttcgaggcctcgggcaggagtcatttcaagacggagggatcttactctttcgtattcaaggactatggctgcactgtggagtatttccgatcaccttttcttggtcaagaatgggagatgccggacaataatgggtcgaagaaggaaacactccggctcgacatagttgagaaatcggcttctaattacaaggatgcatatgctatcatcttcaacaccgggcattggtggactcacgacaagacggcccaagggaaagattactaccaagaaggcaaccatgtgtatagtgagc

SEQ ID NO: 4543 - DNA, 399 bp, Lilium asiatic
  Clone ID: LIB3230-026-P1-K1-H2
ctgatctttcagctttttcggctttctcaaggtaccctacctatgttccttctactcaagctcccacattaaacggaggaagctgttctccaactgataagaagaccacagaggctctaaaaacagtatcaaccgacaatgtgatatatgatgtaaatgctgcactccttacaggttctaatggtagcagtgataacaatgacatgggctccagtacaaggagcgccttcactaagccaacaacattcaaggagaagacggtgtccgaatcaccattcaagtctgcccacaacttcagccttccaccccgtgcagcttcgtacttcacaagccatgcatgaaaagactgatggtgcttgtgtaacacaaccgagagacattcaacatcaggttcagatg

SEQ ID NO: 4544 - DNA, 267 bp, Lilium asiatic
  Clone ID: LIB3230-026-P1-K1-H3
ctgatctttcagctttttcggctatctcaaggtaccctacctatgttccttctactgaggctcccacattaaacggaggaagcttgtttccaactgataagaagaccacagaggctctaaaaacagtatcaaccgacaatgtgatatatgatgaaaatgctgcacttcttacagattttaacggtagcagtgataacaatgacatgggcttcagtacatgaaaagatttgaagtagatggactggatcaagaaccggaatggtgacc

SEQ ID NO: 4545 - DNA, 399 bp, Lilium asiatic
  Clone ID: LIB3230-026-P1-K1-H4
ctgatctttcagctttttcggctttctcaatttaccctacctatgttccttctactcaggctcccacattaaacggtgggagctgttctccaactgataagaataccacagaggctctaaaaacagtatcaaccgacaatgtgatatatgatgtaaatgctgtactccttacaggttctaatggtagcagtgataacattgacatgggcttcagtacatggagcgcctttactaagccaacaacattcaaggagaagacggtgttcgtatcaccattcaagtttgcccacacctcatacttccaccccgtgcagcttcttacttcacatgccatgcatgaaaagactgatggcgctgttgaaactctaccttgagacatccaacatcaggttcaaatgc

SEQ ID NO: 4546 - DNA, 397 bp, Lilium asiatic
  Clone ID: LIB3230-026-P1-K1-H5
agctgcagattgtaccaatgtcaaggtctgcaacaactgccgcaagccaggccatatggcccgtgagtgcccaaacgacccagtgtgcaacctgtgcaacatttctggccacgttgcccgccaatgcccgaaagctaacgtggcatctgagatccatggagggcctttccgtgaaatcatttgtcgcctatgcaaccagccggggcatatcagccgtgactgcatcgcaattatcatctgcaacacttgtggcgggcgtggtcacatttcgtatgagtgtccttcggggagaggtcttcaacgaggctttcgcaggtattgattatggcagacctgcctccagctgtggagatagtgggatcttgacgcttggtagtgctgagcatattggtgtata

SEQ ID NO: 4547 - DNA, 243 bp, Lilium asiatic
  Clone ID: LIB3230-026-P1-K1-H6
ttcgtcaaggtctgtattaactgccgtaagccaggccatatgggccgtgagtgcccaaacgacccagtgtgcaacctgtgcaacatttctggccacgttgcccgccaatgcccgaaagctaacgaggcatctgagatccatggaggggtatttcccgacaccatttgttgtctatgcaaccagccggggcatatcagccgtgactgcatcgcaattatcatctgcaacacttgtggcgggcgt

SEQ ID NO: 4548 - DNA, 391 bp, Lilium asiatic
  Clone ID: LIB3230-026-P1-K1-H7
ggtgattcacttaatcggaacatgtgggagtctctggtttgtattttgagaaactctgtgaaggacaagaagagggtgttcgaggcctcgggcaggagtcatttcaagacggagggatcttactctttcgtattcaaggactatggctgcactgtggagtatttccgatcaccttttcttgttcaagaatgggagatgccggacaataatgggtcgaagaaggaaacactccggctcgacatagttgagaaatcggcttctaattacaaggatgcatatgctatcatcttcaacaccgggcattggtgcacttacgacatgacaggccaagggaaagattgctaccaagaagtgcaccatgtgtatcgtgagctgtacgttgcggaagctt

SEQ ID NO: 4549 - DNA, 397 bp, Lilium asiatic
  Clone ID: LIB3230-026-P1-K1-H9
gtcctcctttgccttgtgtatcttttcaatgagccagcagctaaagaagcaaaatcacggatggcaatgccaaaccttgaggcaacttttgaaattttagtcgatacttttgtcttcttggataagaataaggatggatacgtcagcaagagcgagatggtgcaggcaataaatgagacaactgcaggagaacggtcttcagggcgcatagccatgagaagatttgaagagatggactgggacaagaacgggatggtgaccttcaaggagtttctatttgcttttactcgttgggtgggaatcgatgaaaccgaagatgatgaagacgacgacaatgaatgagattctcatggttataagttgcatggggttgccccatattatcaataatggtgct

SEQ ID NO: 4550 - DNA, 386 bp, Lilium asiatic
  Clone ID: LIB3230-027-P1-K1-A10
cacagatctgagatacccaatgaacagtaacactgtgccattttgggctgttccatttattgcaatattgttaccttttgtaatcattggtggattttacttcctgaggaggaatgtttatgatttgcacaacgccatattgggccttttattttccgttcttattactgcggggttaacggatgcaatcaaggatgctgttggtcgaccacgtccagactttttctggcgctgtttcccataaggaatatcttgctatgacaatgtcaccacaggtgttatatgccatggagaaaaaagcgttttatggaaggtcacaagagttttccgaggaggcattcttcatggacttttgcatgtttaggatttcttgctttggtatatat

SEQ ID NO: 4551 - DNA, 331 bp, Lilium asiatic
  Clone ID: LIB3230-027-P1-K1-A12
aaatcagcttcgtcggaatgagacacaggaccaaatacttaactatatcaatcagctttgtgagcgcttacctagtcctatgggagaatcagctgttgactgtgctagtcttgacacgatgcctaatgtctcattttcaattggtggcaaaacttttgagctgacaccagaacagtacataatgaaggttggtgagggacctgcagctcaatgcattagtggattcacagctatggatgtaccgcctcctcgtggtcccctttggattttgggagatgtcttcatgggtgtctaccacaccgtctttgactatggtaaaaaggggggtggg

SEQ ID NO: 4552 - DNA, 365 bp, Lilium asiatic
  Clone ID: LIB3230-027-P1-K1-A2
ctcgatggcggcggagctccgacggtgacgagctcctacaaccgtgagctctaacattgatgagcctcgacacccgcatcatcactggcgcactctagtagcggtgaagaactccgatgatggcaacgaacccctccctctctctcttcccgctgcctctactgcgaaaccctaactcgcaacaaaggggattcttcgggttgttgtcggcggcaaagatctctggcaacaacacatcaaatactcttcctcttcggctacctcctcgatggcggcggagctccgacggtgacgagctcctacaaccgtgagctctaacattgatgagcctcgacacccgcatcatcactggcgcactctagtag

SEQ ID NO: 4553 - DNA, 338 bp, Lilium asiatic
  Clone ID: LIB3230-027-P1-K1-A3
caacaattagaacctccgccaacggtgcggagctcctaatccatcattggacagatcttcgcatcctcacttgaacctccgccaacaattaggttgatctgatcgttccccgtccatgtggactcgcgcccaatgactctttaggtctcactcgggccgagtgcgagtggattgtgcaccacacctggtccgactcaacggttgtatccttggcggtggggttgtcattctccatcaggatgttgatggtaagaaaattggggtgtcttcaaagaggaagatggtgcttgcctcgactaaggtgtatacacaattaaggtccaccgtattaactttta

SEQ ID NO: 4554 - DNA, 339 bp, Lilium asiatic
  Clone ID: LIB3230-027-P1-K1-A4
ccgatgattccaacgaacacctcgaaggtgttctgtcgtcaaacaagcgcgcatcaacaatgtcagcactggatagtttagtggttgcagatgataaaggaaatgatgcagcagatgagcatgcagagcttgagggagtgtcatcatcaagcaactctgaatcaaaaagtctgagggagcttgagggagttttatcgtcaagcaagcttacatcaacaatgtcagcactggatagtttagtggtcgcagatgataaaggaaatgatgcagcagatgtgcatgcagagcttgagagagattcgtcatcaagcaagtctgaatcaaaaagtctgagggagc

SEQ ID NO: 4555 - DNA, 249 bp, Lilium asiatic
  Clone ID: LIB3230-027-P1-K1-A8
cccacgcgtacgcggacgcgtgggtgaacatggcagcggagcagtgaaatccctcgcgcggaaaaccaaaggccgttcactaaagaaatcaaaggaaacacccgcatgcacatgatagtgaactactgtccttgattccagtgacgaacatgacagcggtgtcccgaaatcttctatgggtcagtccaaaggacgacccccgaagatattaaaggaggcttacttaaagcaaattctgagtacgaggac

SEQ ID NO: 4556 - DNA, 390 bp, Lilium asiatic
  Clone ID: LIB3230-027-P1-K1-A9
gttttcttcttcatcttccaaggatgtgagcaacccttacgccctctggctgctaggcaggctcctgactcaactgcacctctggtaccatgggcaaatagctccacatctactgagttgtttcccagaatgtttgttcaaggattaagtggaaaataatgcattatgcacttatgctgcttgcagtgtgggaagaagccaaatggggacccgtcatctcaacccttgctccatcaacaacctcatcaaatggttcctgtgcaagatacttacatgcaaagcagagcagaggctcttcataatgttgaatcaaccattcatgagctaagcaacatctttacacaactagctaccatggatcccgagttttatgtgcttaaaagaaatgca

SEQ ID NO: 4557 - DNA, 400 bp, Lilium asiatic
  unsure (1)..(400): unsure at all n locations
  Clone ID: LIB3230-027-P1-K1-B10
cctcgactggtacaagggtcccaccctccttgaggcccttgacttaatcaatgagccaaagaggcccacagacaagcccctccgccttccccttcaggatgtgtacaagattggaggcattggaactgtgccagtcggccgtgtggagactggtattgtgaagcctggtatggtagtgacttttgggccaactggtctgaccactgaagttaagtctgttgagatgcaccatgaggctctccttgaagccctccctggtgacaatgtgggatttaatgtgaagaatgttgctgtcaaggatcttaagcgtgggtttgttgcctcgaactccaaggatgaccctgccaggaggcggncaacttcacttccaggttatcatcatgaaccaccctggcagatc

SEQ ID NO: 4558 - DNA, 303 bp, Lilium asiatic
  Clone ID: LIB3230-027-P1-K1-B12
gcgttcgacagctaccaagcagttaattgatcaaagctcggaagcccgaagatgatgccaaaggggaagaagaagcgtttgaggaggctcaagaggaagctcctaaagatgaggcacttatcaaagtaagtgtctttatgtgatgatggcacccttcatcaattttgctcgcattttctggagatcctgtgatccagtcatctactggtgtgagtgtgtgatggtactggtgtatcctatcatctttgggtttgttaggtctgttttgcacctttataaacctttttatgaggcagtaagctt

SEQ ID NO: 4559 - DNA, 205 bp, Lilium asiatic
  Clone ID: LIB3230-027-P1-K1-B2
gccggctctcactggtagccgtggcggtcactgcagcactcgctgtggatgccgatggtccagcgtcttaccactgactacgatctggcatgaggcgttactgcgcgcccagatcgttagtagctctgacctagagatattaactgtgctggacatccagctgtgtgggatacacaggctattgctggaacctgtgagcggcacc

SEQ ID NO: 4560 - DNA, 207 bp, Lilium asiatic
  Clone ID: LIB3230-027-P1-K1-B3
atttcactgcaaacacgtcagtcgtcaactttgtgctgcatggcagttacatcaaggttttcgtgctgtcaacattttgggaacatccatctcgcagtcttctatactctgccgcagcatgctctaagtttattaacagccttttgcattacctaacatttgagggtcttggacctaattggcatctgatgcatgatagacttcaga

SEQ ID NO: 4561 - DNA, 345 bp, Lilium asiatic
  Clone ID: LIB3230-027-P1-K1-B4
cgtcattccccccagcagccgagagaggagagagcagcaatggtgcagcgcctgacctaccggaagcgccacagctatgccaccaagtcgaatcagacgagggtcgtcaagaccccaggtgggaagctggtgtaccagaacactaacaagagggctagcggaccgaagtgtccggtgactgggaagaggattcaggggattcctcacctgaggcctactcagtacaagaggtctaggttggctaggaatcggaggactgtgaatcgtgcttatggaggggtgctctctggcagtgctgtgagggaaaggattattcgtgcctttcttcttgaggagcagaagatt

SEQ ID NO: 4562 - DNA, 342 bp, Lilium asiatic
  Clone ID: LIB3230-027-P1-K1-B5
gttgattgactatagcggaagggcaagacacaagtgaggttggtacacctatttatggctaatgtgaatgatacagtcattatacaacaaatatcccatgggcattacaaaagaagccatggtctaccagatggagaacataagcaagtcatgggcattggcaatgattgatgagaaggcataggctaaggtaggaaagttccttgatccagaagacagtacagaaaatggtgtgcagttgaaagcagtgtacggtatgagcaatgaaggaaggcttatgtgtctagtgattagcagttgtgcaagcatgggccagtgtgtaataaggagcagcatccatgg

SEQ ID NO: 4563 - DNA, 295 bp, Lilium asiatic
  Clone ID: LIB3230-027-P1-K1-B7
ggagaaggcgagcaaggggaggaaggaggaggtcgtcacgagggagtacaccgtcaacctccacaaacgcctccacggatgcaccttcaagaagatggctcccaaggccatcaaggagattagaaagtttgcccagaaggcaatggggactactgatgtgagggttgacgtgaagctcaacaagcaaatctggagcagagggattcgaaatgtccctcgacgagttcgggtgaggattgctcgcaagaggaatgaggaagaagatgctaaggaggagctctacttggtggttact

SEQ ID NO: 4564 - DNA, 395 bp, Lilium asiatic
  Clone ID: LIB3230-027-P1-K1-B8
caacattttataattattactatcggtaaagtgcaagtgttaaataacaattcaacttctcatctactcaacagtctcgacaataatagtaacaacactcggtaaaatctctctcagtaaataagttacttgctgaactccaaactcgatgctgctccactaactgaatctcacaaaaatatggtgtcggaccatgcaggacactcacgccattttagtttgtatttgtcgatgtatatgtacaaggaactcaacatacgaaagtccaccgggtgccttgtcttcaaccatgtatgaatagaaaagcatgcctgacggatcaccctttctacacaaccggaaacgtaagtacgaacatcttttgcgtctgatctcatttaccagatcattaagcg

SEQ ID NO: 4565 - DNA, 384 bp, Lilium asiatic
  Clone ID: LIB3230-027-P1-K1-C1
gaggccttcgttttggagagatggagcgagattgcatgattgcgcatggggctgcgcattttcttaaggaaaggttgttcgatcagagtgatgcttatagggttcatgtttgcgagaaatgtggtatcattgctattgccaacctcaagaagaattcctttgagtgtcgtggttgcaagaacaaaactgacattgttcaggttcatataccatacgcatgtaagcttctcttccaggagctgatgtccatggcgatagctccgagaatgatgactaagcaagtaaaggctatcaaagatcataagagaaaaggtgcatgaaaacattgatcttcttgttgcacactatgactgatatggtgttggaaccttaacttatttattt

SEQ ID NO: 4566 - DNA, 374 bp, Lilium asiatic
  Clone ID: LIB3230-027-P1-K1-C12
gaagaaagaagactccaagaaagacagtagtggagatacgaagaaagaagactccaagaaagacactaaggatgccaagagcgagtccaaacataaatcacacaaagatgttaaacaaatagggatcccagaagaacctcctcgacatccaggattctttttgcaaaccaaacagcccatagattctaaagagcgtttgcggtccatgtccctatcgttggatggtctcctggattacaatgacaaggatattgaagaatcgacatttgagctttcactctttgcggagtcgctcaatgaaatgcttcagtacgaaaatgggatctcgcatcttgtcatttcttgagaattgcgcagtagatatgttgcgcaaa

SEQ ID NO: 4567 - DNA, 384 bp, Lilium asiatic
  Clone ID: LIB3230-027-P1-K1-C4
cgagctagcaagcagtcggttgatcagagctcggaggcccgaagatgagggcgaagtggaagaagaagcgtatgaggaggctcaagaggaagcgccgaaagatgaggcagcgatcaaagtaagtgtctttatgtgatgatggcaaccttcatcaattttgctcgcatgttctggagatcctgtgatccagtctctcctggtgtgagtgtgtggtggtactggtgtagccttttatcttgtgttatgtagggtctgttttgcacctttataaacctttctatgtggcaggaagtttgtcttttttatgttccaaccgtcttgtttgtttgatacaaaggttattgaaagttatttcaattcttgagggttttgttggattatctt

SEQ ID NO: 4568 - DNA, 379 bp, Lilium asiatic
  Clone ID: LIB3230-027-P1-K1-C6
ggctccggttccgggccgcgatcccacgctcgcgcaaaacctaatcaccggagaatcgccgccgccgactccgccgcctacttcttctcctcccgctgctagttgccgcaactccgcttccagtcgcctccgttgtttccgacgtctcaagttacgtctggaacagaagagaataatgtcttactgccacgcacgtgacttcttgttctgcagcatgtgtggaacccttttgacattgaatttgtctgacttcgcagagtgcagtctttgtggtttcaaacgtaatgcagcagagattgctgggagagaaactcggtatactctcactgctgaggacattagaagggagttgaagcttcaaccctttcattattcttga

SEQ ID NO: 4569 - DNA, 397 bp, Lilium asiatic
  Clone ID: LIB3230-027-P1-K1-C7
ggagaaggcgagcaaggggaggaaggaggaggtcgtcacgagggagtacaccgtcaacctccacaaacgcctccacggatgcaccttcaagaagatggctcccaaggccatcaaggagattagaaagtttgcccagaaggcaatggggactactgatgtgagggttgacgtgaagctcaacaagcaaatctggagcagagggattcgaaatgtccctcgacgagttcgggtgaggattgctcgcaagaggaatgaggaagaagatgctaaggaggagctctactcgttggttactggtgccgaggttcctgctgagggattgaaaggattgggaaccaaagtgatcgatgaagctgattgaagtctttaattatcacttaggttattgagacatctt

SEQ ID NO: 4570 - DNA, 391 bp, Lilium asiatic
  Clone ID: LIB3230-027-P1-K1-C8
ggagaaggcgagcaaggggaggaaggaggaggtcgtcacgagggagtacaccgtcaacctccacaaacgcctccacggatgcaccttcaagaagatggctcccaaggccatcaaggagattagaaagtttgcccagaaggcaatggggactactgatgtgagggttgacgtgaagctcaacaagcaaatctggagcagagggattcgaaatgtccctcgacgagttcgggtgaggattgctcgcaagaggaatgaggaagaagatgctaaggaggagctctactcgttggttactgttgccgaggttcctgctgagggattgaaaggattgcgaaccaaagtgatcgatgaagctgattgaagtctttaattatcacttaggttattggga

SEQ ID NO: 4571 - DNA, 359 bp, Lilium asiatic
  Clone ID: LIB3230-027-P1-K1-D1
cggacgcgtgggcggacgcgtgggcggaggctaagcttcttttcatcattcgcatccgcggtatcaatgccatgcacccaaagactcgtaaaatcctccagcttcttcgtttgcgccagatctttaatggagtttttctcaaggtcaacaaggccactgtgaacatgttgcaccgagttgaaccctacgtcacttttgggtatcccaacttgaagagtgtcagggagttgatctacaagagaggtttcggcaagcttgataagcaaaggattcctttcactgacaactctgtaattgagcaggggctgggcaagcatggaattgtctgcattgaagatcttgttcatgagattgtgact

SEQ ID NO: 4572 - DNA, 400 bp, Lilium asiatic
  Clone ID: LIB3230-027-P1-K1-D10
gaagaaagaagactccaagaaagacagtagtggagatacgaagaaagaagactccaagaaagacactaaggatgccaagagcgagtccaaacataaatcacacaaagatgttaaacaaatagggatcccagaagaacctcctcgacatccaggattctttttgcaaaccaaacagcccatagattctaaagagcgtttgcggtccatgtccctatcgttggatggtctcctggattacaatgacaaggatattgaagaatcgacatttgagctttcactctttgcggagtcgctcaatgaaatgcttcagtacgaaatgggatctcgcatcttgtcatttcttgagaaattgcgcagtagatatgttgcgcaaaagaaccaacgcaagagacagagggaa

SEQ ID NO: 4573 - DNA, 397 bp, Lilium asiatic
  Clone ID: LIB3230-027-P1-K1-D11
agaagaggttcaaatttcccgagaacgcagttgagctgtatgctgagaaggtgaacaaccgtgggctctgtgccgtggctcaggctgagtctctccgttacaagctccttggtggccttgctgtcaggagggcttgttatggtgtccttaggttcattatggaaaatggagctaaaggttgtgaggtcatagtcagtgggaagctcagggcccagcgtgccaagtccatgaagtttaaggatggctacatgatttcttctggtcagcctgttaatgaatacattgatgcagctgtaagacatgtattgctgcgacagggtgttcttggcatcaaggtgaagatcatgcttgattgggatcccaagggtaaatctggcccaactaccccattacctga

SEQ ID NO: 4574 - DNA, 371 bp, Lilium asiatic
  Clone ID: LIB3230-027-P1-K1-D2
cggacgcgtgggggaaaaatgatctcaataagataaaccagaaagctgcagagtctttggctgatcctgaagagtaccctaatttgtttgataactgggaggttgctcttgcagttgagtctagtcttgcccataaaagggacagctatcctcctgccgaggaatacttaagctatgcggaaaagtcccatgttaatctcgtggaagcttttaggagcatgcgggttgatgaagatgatgctatgccacttgaaaatggagattctggtcatgaggtggagggagaagatgagggtgaaggagccatcgaggaaggtgaaagagccatcgaggaaggtgaagaagcccgtgaagtagatgctgatgattct

SEQ ID NO: 4575 - DNA, 354 bp, Lilium asiatic
  Clone ID: LIB3230-027-P1-K1-D4
ggggtttataagggtttgccgtatgggagaggagtctctcacataaagagacacccctctgcaagtcgatcccaataggttcgcctgcccagcttatatccttaccattaccattatttttgctccgcattttgagtgtttgaaagcaaaatgtcatacggatattagctcattaactaaacctgagcattaagaaaaacgctagatcatcattcaaaatatgttagaacagcatttaacaagtcagtgtaagatataaatacaagtgttgtttcagatatagggaacaacaacgacacagctcacaaatagtggtgtatctaatatccacattgttctctacttccattattc

SEQ ID NO: 4576 - DNA, 355 bp, Lilium asiatic
  Clone ID: LIB3230-027-P1-K1-D5
agaagaggttcaaattttccgagaacgcagttgagctgtatgctgagaaggtgagcaaccgagggctctgtgccgtggctcaggctgagtctcttcgttacaagctccttggtggccttgctgtcaggagggctagttatggtgtccttaggttcattatggaaaatggagctaaaggttgtgaggtcatagtcagtgggaagcttaaggcccagtgtgccaagttcatgaagtttaaggatggctacatgatttcttctggtcagcctgttaatgaatacattgatgcagttggaagacatgtattgttgcgacagggtgttcttggcatcaaggtgaagatcatgctttgatt

SEQ ID NO: 4577 - DNA, 252 bp, Lilium asiatic
  Clone ID: LIB3230-027-P1-K1-D7
agcagctcagcccggctgcctccaacggcaatgaggcctcgccggcacagtgaatggaggtgaaattctcccctgacgcaaaatgtatctttacaatgttgtgttttatcgtactagaaggaatcatggtattattgttgtagtaggaatgtaattgatttctttaaacctgtctggagattctgagcatatttcttgttcaacggaaaaaggtttcagtatttgtatcaacttggtgactaatttttttaa

SEQ ID NO: 4578 - DNA, 252 bp, Lilium asiatic
  Clone ID: LIB3230-027-P1-K1-D8
agcagctcagcccggctgcctccaacggcaatgaggcctcgccggcacagtgaatggaggtgaaattctcccctgacgcaaaatgtatctttacaatgttgtgttttatcgtactagaaggaatcatggtattattgttgtagtaggaatgtaattgatttctttaaacctgtctggagattctgagcatatttcttgttcaacggaaaaaggtttcagtatttgtatcaactaggtgactaattcttttaa

SEQ ID NO: 4579 - DNA, 373 bp, Lilium asiatic
  Clone ID: LIB3230-027-P1-K1-E1
gacaaggtgtgcactgcagaatgctgcatcggtggcggggatgattttgacgacacaggctattgtggttgagaagcctgcgccgaaggctcctgcacctgctgagcctcaagggctgaccatataagcgaggttcttgcccgctctatatagcgggttgtctttttgtcggacttggatataggtgcagggtaggtttggtagaactcgatagattcagaactgaaatttgagttgaaacttttcttgaatgagctaccgactgagtgagttgcggcaaaattgttgtggccagtaaagataaaattatttcagtgtaataagccaagactggtgcataatggctttaatattgttggaagtgctagggccc

SEQ ID NO: 4580 - DNA, 407 bp, Lilium asiatic
  Clone ID: LIB3230-027-P1-K1-E11
gttaaaattgccaaggtgcttggaacagatgagctaaatacatatcttaacaagtgtggcttggagcttgacccacagcttgatgctcttgttggaaggcacagtcggaaaccttggtctaagtttattaatgcggataaccagcatctagtttctccagaggcaatagattttcttgacaagcttcttcgatatgatcatcaggatcgacttaccgcacgagaagcaatgacacatccatattttcttcaggtgagagcagcagagaacagcaggactcgtccccagtaaggttggtgttgctgagtcggctattcttaactatggtggcggtgttacaaatttgacatgagttggctattcatagctatgtggacggtggacggtgttacaaatgtgactttcat

SEQ ID NO: 4581 - DNA, 406 bp, Lilium asiatic
  Clone ID: LIB3230-027-P1-K1-E12
gttgaagatcttgaagctgctggtattcaggttatccaaattgatgaagcggctcggagggaaggactgccacttcgcaaatctgagcattctttctacttggactggtctgtccactcattcagaatcaccaactgtggcgtgaaggacaccacccagatccatacccatatgtgttacagcaacttcaatgacatcatccattcgatcattgacatggatgctgatgtgatcactattgagaactctcgctctgatgagaagctgctgtcagtgttccgtgagggtgtcaagtatggtgctggtatcggcccgggtgtttacgacattcattcccccaggatcccgtcgaccgaggagattgctgacaggatcaacaagatgcttgctgtgctcgagaccaaca

SEQ ID NO: 4582 - DNA, 376 bp, Lilium asiatic
  Clone ID: LIB3230-027-P1-K1-E6
gttaaaattgccaaggtgcttggaacagatgagctaaatacatatcttaacaagtatcgcttggagcttgacccacagcttgatgctcttgttggaaggcacagccggaaaccttggtctaagtttattaatgcggataaccagcatctagtttctccagaggcaatagattttcttgacaagcttcttcgatatgatcatcaggatcgacttaccgcacgagaagcaatgacacatccatatttccttcaggtgagagcagcagagaacagcaggactcgtccccagtaaggttggtgttgctgagtcggctattcttaactatggtgggggtgttacaaatttgacatgagttggctattcatagctatgtgga

SEQ ID NO: 4583 - DNA, 395 bp, Lilium asiatic
  Clone ID: LIB3230-027-P1-K1-E7
gccgtcgaggaggagaagaaggcggttccggcggagaagaagcctgctgagaagaagccgaaggccgggaagaaggtcccggcctccaaggagggggcctctgacaagaagaagaagaggtcgaagaagtcggtggagacctacaagatctacatcttcaaggtgttgaagcaggtccaccctgacatcgggatcttcagcaaggcaatggggatcatgaacagcttcatcaatgatctctttgagaagatggctcaagagttcggccgccttgcttgcttcaacaagaagaacaccatcaccttttgggagaatcagacttttgtccgtcttgttccttccggtgagtctttcaagcatgccctttctgtaggcaccaaggtggttaccaagtt

SEQ ID NO: 4584 - DNA, 363 bp, Lilium asiatic
  Clone ID: LIB3230-027-P1-K1-F1
acttgacagctgcactttgaaagaaattcaacaactagagcaacaacttgaaactgctttaaaacatattagatcaagaaagaaccaacttttatttgattcgcttacagagctgcagaaaaaagagaggtcgcttcaggaagaaaataaagcactcgaaaaggttctccaggagcacaaggcgaacgctttgacccagtgggaagaacaacggcaaggacagcctcatacaagcacctgcttgccctccttcctcttgcctgatcatcttcccaccctaaacatagggaactatcaagctagagataatgatcccgaaaatgagggaggggaagcacaacccctggcacgaacggacagcaa

SEQ ID NO: 4585 - DNA, 400 bp, Lilium asiatic
  Clone ID: LIB3230-027-P1-K1-F12
cccacgcgtccgcctgaaatggcggccaccgttgcaatcgagactcccgcctttgctccggtccctgtcgtcggagatgatccggtggcgaagccggccaaggagacaaaggcaaagacccctaaggagaagaaggcctccgttgcaaagaagccagctctccatcctacctatcttgagatgatcagcgaagcaatctcttcgctgaaggagcggactggatctagccagtatgctatttcaaagtttgttgaggacaagcacaagtcccatctcccggcgaacttcaagaagcttctccttgtccagttgcggaaactcaccgctgctggtaaactcaccaaggtgaagaactcctacaagatctctgtcaaaccaacctctgctgcgaagtccaagt

SEQ ID NO: 4586 - DNA, 405 bp, Lilium asiatic
  Clone ID: LIB3230-027-P1-K1-F2
ggagaagaagtcggtccctgcagagaagaagaggtcgaagaagtcagtggagacctacaagatctacatcttcaaggtgctgaagcaggtccacccggacatcggaatctccagcaaggccatggggatcatgaacagcttcatcaatgacctcttcgagaagatggcgcaggagtccgcccgccttgcccgctacaacaagaagaacaccatcacctcccgggagattcagacctccgtccgcctcgtcctccctggtgagctcgccaagcatgccgtctctgagggcaccaaggctgtcaccaagtttaccagcgcttaagcttaggggtgtttctactgtcctagggttctcatctggcgtgtatctctttttttctatctcggaagaaagaagtttgttgt

SEQ ID NO: 4587 - DNA, 276 bp, Lilium asiatic
  Clone ID: LIB3230-027-P1-K1-F3
cccacgcgtccgcccacgcgtccggtcaggaccacaactgggaaaagggattttgtctctcaagggagcctgggatggtggtcttgatattcctcacagagacaagaggttagctggtttcaagaaagatgacaagcaactggatgcagagattcataggaagtatatctttggaggacatgttgcctcttacatgaggtctttgattgatgatgagcctgagaagaatcagactcactttttttgaattaatcaagagggggattgatccggatc

SEQ ID NO: 4588 - DNA, 397 bp, Lilium asiatic
  Clone ID: LIB3230-027-P1-K1-F4
gttgaagatcttgaagctgctggtattcaggttatccaaattgatgaagcggctctcagggaaggactgccacttcgcaaatctgagcattctttctacttggactggtctgtccactcattcagaatcaccaactgtggcgtgaaggacaccacccagatccatacccatatgtgttacagcaacttcaatgacatcatccattcgatcattgacatggatgctgatgtgatcactattgagaactctcgctctgatgagaagctgctgtcagtgttccgtgagggtgtcaagtatggtgctggtatcggccccggtgtttacgacattcattcccccaggatcccgtcgaccgaggagattgctgacaggatcaacaagatgcttgctgtgctcg

SEQ ID NO: 4589 - DNA, 324 bp, Lilium asiatic
  unsure (1)..(324): unsure at all n locations
  Clone ID: LIB3230-027-P1-K1-F7
gccgtcgaggaggagaagaaggcggttccggcggagaagaagcctgctgagaagaagccgaaggccgggaagaaggtcccggcctccaaggagggggcctctgacaagaagaagaagaggtcgaagaagtcggtggagacctacaagatctacatcttcaaggtgttgaagcaggtccaccctgacatcgggatctccagcaaggcaatggggatcatgaacagcttcatcaatgatctctntgagaagatggctcaggagtccgcccgccttgctcgctacaacaggaagaacaccatcacctctcgggagattcagactttc

SEQ ID NO: 4590 - DNA, 271 bp, Lilium asiatic
  Clone ID: LIB3230-027-P1-K1-F8
cccacgcgttcgtccacgcgttcggtcaggacaactactgaaaagggagtttttggtgctctcaagggagccttggatggtggtcttgatattcctcacagtgacaagaggtttgctggtttcaagaaagatgacaagcaactggatgcagagattcataggatgtatatttttggaggacatgttgcctcttacatgaggtctctgattgatgatgagcctgacaagtatcatactcacttttctgatttcatcaagagggggactgatc

SEQ ID NO: 4591 - DNA, 225 bp, Lilium asiatic
  unsure (1)..(225): unsure at all n locations
  Clone ID: LIB3230-027-P1-K1-F9
cccacgcgtccgcccacgcgtncggtcaggacaactactggaaatcgagtttttggtgctctcaagggagccttggatggtggtcttgatattcctcacagtgacaagaggtttgctggtttcaagaaagatgacaagcaactggatccagagattcataggaagtatatctttggaggacatgttgcctcttacatgaggtctctgattgatgatgagcctgag

SEQ ID NO: 4592 - DNA, 397 bp, Lilium asiatic
  Clone ID: LIB3230-027-P1-K1-G10
gagagttcgtcgagtcagtctgatgttaactgtatcgagtgtcccgaatgtgctaggtttatctgcattcggtgttgtgtaccatggcatgtctccatgagctgtgaagagtaccaaaacttgcctgtcgatgaaagagatgaaggagatatcactttgcatcggttggctcagaataataggtggagacaatgccagcaatgtaggcgaattattgagctcacacaagggtgctaccatatgacctgctggtgtgggcacgaattctgctactcatgcggagccgaatacagggatggagctcagacttgccagtgtgaactcttcgacgatgacacccccgaaccttctgttgtgagttcaaaccatgaatcggaacagtggagatgggaatcct

SEQ ID NO: 4593 - DNA, 396 bp, Lilium asiatic
  Clone ID: LIB3230-027-P1-K1-G11
gagagttcgtcgagtcagtctgatgttaactgtatcgagtgtccggaatgtgctaggtttatctgcattcggtgttgtgtaccatggcatgtctccatgagctgtgaagagtaccaaaacttgcctgtcgatgaaagagatgaaggagatatcactttgcatcggttggctcagaataataggtggagacaatgccagcaatgtaggcgaattattgagctcacacaagggtgctaccatatgacctgctggtgtgggcacgaattctgctactcatgcggagcctaatacagggatggagctcatacttgccagtgtgaactcttcgacgatgacacccccgaaccttctgttgtgagttcaaaccatgaatcggaacagtggtgatgggaatcc

SEQ ID NO: 4594 - DNA, 244 bp, Lilium asiatic
  Clone ID: LIB3230-027-P1-K1-G12
ttttattttttctcattttctttatcttttgttatccggtaactaatcggagcacgcaaggctatttcttttgcaatcaccgtggttgaaaatgtcgtcgaggattttgtctcctagggggagatgcagaatcgcatgatgttccaagatgcgaacctcttaaaatttaagtttgagttcagaagcttcaagaccatcattcttcttattggcaactggcgaatgaaaaactttgaggaggata

SEQ ID NO: 4595 - DNA, 306 bp, Lilium asiatic
  Clone ID: LIB3230-027-P1-K1-G2
cccacgcgtacgcccacgcgtccgtctgttatggctgccaccgttgcaatcgagactgccgcctttggttcggtccctgtcgtcggagattatccatttgctaatcctgccaaggagacataggcaaagaccccttaggagaagaaggcctccgttgcaaagaagccagctcttcattctacctatcttgagatgatcagcgaaacaatttctttgcttaaggagcgtactggatctagccagtttgctattttaaagtttgttgatgacatgctcaagttccatcttccggcgaactttaagaag

SEQ ID NO: 4596 - DNA, 407 bp, Lilium asiatic
  Clone ID: LIB3230-027-P1-K1-G5
aaacagtttcacaagggaccatttcggcttgttgctgaggagggtaaatctaaatgttcatgggtgagcctgaatgacatcaccaattgcttgataagaggtgatcctgaaaaatctcatcatcaacgtgtagctgaactccagcgtcttcgttccacatttgcgacaagtgaaagacagtgggtggaagcacaagttgagaatgcaaagcagcaggctattctttctaagctcaaatctcaggtgtcatcagatgaagctcacatccatcgagacattcattcactcaggagaagacattctgaacttgcaggagagctatcaaatcttcaccgtaaagagcataagttcttatctgagactattccatgtctttgcttagagctagctcaactccaggacacata

SEQ ID NO: 4597 - DNA, 406 bp, Lilium asiatic
  unsure (1)..(406): unsure at all n locations
  Clone ID: LIB3230-027-P1-K1-G6
aaaccgtttcacaagggaccatttcggcttgttgctgaggagggtaaatctaaatgttcatgggtgagcctgaatgacatcaccaattgcttgataagaggtgatcctgaaaaatctcatcatcaacgtgtagctgaactccagcgtcttcgttccacatttgcgacaagtgaaagacagtgggtggaagcacaagttgagaatgcaaagcagcaggctattctntctaagctcaaatctcaggtgtcatcagatgaagctcacatacatcgagacattcattcactcaggagaagacattctgaacttgcaggagagctatcaaatcttcaccgcaaagagcataagttcttatttgagactattccatgtctttgcttaaagctagctcaactccaagacacat

SEQ ID NO: 4598 - DNA, 379 bp, Lilium asiatic
  Clone ID: LIB3230-027-P1-K1-G7
gtcgtcgaggaggagatgaaggcggtttcgtcggagaagaagcctgctgagaagaagccgaaggccggtaagaaggacccggccttcaaggagggggcctctgacaagaagaagaagaggtcgaagaagtcggtggagacctacaagatctacatcttcaaggtgttgaagcaggttcactcctgacatcggtattcccagcaaggcaatggggatcatgaacagcttcatcaatgatctttttgagaagatggctcaggagtccgaccgtcttgctcgcttcaacaagaagaacaccattactttttcgggagattttagacttttcgtccgccttgttcttcccgtcgagctcgtcaagcatgccgccattgtgggc

SEQ ID NO: 4599 - DNA, 374 bp, Lilium asiatic
  unsure (1)..(374): unsure at all n locations
  Clone ID: LIB3230-027-P1-K1-G8
cccacgcgtccgcctgaaatggcggccaccgttgcaatcgagactcccgcctttgctccggtccctgtcgtcggagatgatccggtggcgaagccggccaaggagacaaaggcaaagacccctaaggagaagaaggcctccgttgcaaagaagccagctctccatcctacctatcttgagatgatcagcgaagcaatctcttcgctgaaggagcggactggatctagccagtatgctatttcaaagtttgttgaggacaagcacaagtcccatctcccggcgaacttcaagaagcttctccttgtccagttgcggaaactcaccgctgctggtaaactcaccaaggtgaagaactnctacaagatctctgccaa

SEQ ID NO: 4600 - DNA, 347 bp, Lilium asiatic
  Clone ID: LIB3230-027-P1-K1-G9
attcgaagcaaatcagcgatgtcgggtcgaggcaagggcgggaaggggctgggcaagggcggcgccaagcgccaccgcaaggtcctccgggacaacatccagggcatcaccaagcctgccatccgccgccttgctcgccgcggtggcgtgaagaggatcagtggcctcatctacgaggagacccgtggggtgctgaagatctttctggagaatgtcattcgcgatgccgtgacctacaccgagcacgcccgccggaagacggtgacggcgatggatgtggtgtatgcgctgaagaggcaggggaggacgctgtacggcttcggcggctgatgggtttggtcttctgc

SEQ ID NO: 4601 - DNA, 254 bp, Lilium asiatic
  Clone ID: LIB3230-027-P1-K1-H2
cgtacgctcccggccttcattaagaagactatccttgtgcagctcacgaagcttactgcagctgcgcagcggaccaaggtgaagtactaccacgggtgataaggtaaaccaagtgctgccaagccgaaggcaaagaacgcggccgtgaagccacagcccaagacaactgctgacaagcccaatgctaaatctgctgctgtgaagaaagccaagcctactggcccaaagctgaagacagaatctaagccgaaagc

SEQ ID NO: 4602 - DNA, 386 bp, Lilium asiatic
  Clone ID: LIB3230-027-P1-K1-H3
atctactcctccgactccgactcagatgccgttcaatcctcaaccatgagcaagttcttaggccgacagagacccctccatcatgttctcggcggtggcaaaggtatctcccgctctttcactctcatttctaggaaccaaaaaattaacaattagggaaacattaatttgcatttacagtggctgatgttgtgctgtggagaaacaagcgcctatccggcggcgtgctggccgcagtaacgataatatgggctcttttcgaggtcgtggagtaccatttccttacattcttgtgccacctctcaatcacggcgatgctcgtcgtcttcatttggtctaatggcgcagctctcttcgataagtaatcagctcgatcatgttttctt

SEQ ID NO: 4603 - DNA, 388 bp, Lilium asiatic
  Clone ID: LIB3230-027-P1-K1-H5
cccacgcgtccgggccgcaatttgtttccgaagagtcctttcccaaattagggttccgatctctccttcaaatcccgtttctggaagatgggaactgttgaaaatctggtctaagagcatcaagcatgtttcaccggctcatacactcaacgcccaaaggaaagtcctgcaaaatttcaacttatcaggaaggaagttagtcaccggaagcctccttggactgtctactgtagctggagtgatgtacaaccggtcaaatgttatatatgctatggatgattatgctgattcgggagaaccttcgggatttctgaagaaagatctagataatttggggtcattattaaaagaatttcagctgcctgtagtttttcttataactatattt

SEQ ID NO: 4604 - DNA, 322 bp, Lilium asiatic
  Clone ID: LIB3230-027-P1-K1-H8
cacacgccctggttcggggtatggaggcgcacgggatcgaatcgaagcacgcagaggccatcacgtcggcaatcaccgtggttgaaaatgtcgccgaggatttcgtctccaagggggagatgcagaagtgcatgatgatccaagatgcgaacctctcaaaatttaagtatgaagtgcagagctcccaggaccatcatttctctttattgcaactggcgaatgaaaaacttcgaggagatattgatctactatacaggcgaatacaccatgaactagccaagcaaaatgcagaaactaccaagcattttgccgaacttagaga

SEQ ID NO: 4605 - DNA, 356 bp, Lilium asiatic
  Clone ID: LIB3230-027-P1-K1-H9
gacagatctgagatacccaatgaaaagtaacactgtgccattttgggctgttccatttattgcaatattgttaccttttgtaatcattggtggattttacttcctgaggaggaatgtttatgatttgcacaacgccatattgggccttttattttccgttcttattactgcggtgttaacggatgcaatcaaggatgctgttggtcgaccacgtccagactttttctggcgctgtttccccgatggaattcctcgctatgacaatgtcaccacaagtgttatatgccatggggaaaaaagcgttatcaaggaaggacacaagagttttccgagtggacattcttcatggtcttttg

SEQ ID NO: 4606 - DNA, 317 bp, Lilium asiatic
  Clone ID: LIB3230-028-P1-K1-A12
aaaaaagggaagaagaaaaaaaaaaagaaaaggagagaaaaagaaaaagaaaaaagaaaaaaaaaaaggaagggaaaaaaaaaaaagaaaaaaaaaaaagaagagggaaaaaaaaaaaaagaaagaaaaaagaaaaagaaaaaaaagaaaaaagaaaaaaaaagaaggaaaaaagaaaaaaaaagaaaaaaaaaaaaggaaagaaaaaaaaaaagaaaaaaggaaaaaaaaaaggaaaggaaagaagaaaaaaaaaaacgaaaaaaaggagaagaaaaaaaagagagaagaagagaaaaaaaaaaaagaaagaaagg

SEQ ID NO: 4607 - DNA, 122 bp, Lilium asiatic
  Clone ID: LIB3230-028-P1-K1-A3
ccaacggtgggcttacaaggccttccagaaggggcctttgggcaatgaggggaaaaaaccctttgcttggtcattccatgccaaaggcattggccctgaaaaaaatgggattggaggcaaac

SEQ ID NO: 4608 - DNA, 390 bp, Lilium asiatic
  Clone ID: LIB3230-028-P1-K1-A4
gtgcggaagcatgagtggtcgcatttccgcgaaggtgtaacattagaggggaactcttcaccaaatggaacacttgttgatgttggattgagtaagagtgttgtcgttgaacaagtccttgaacctggactgagggtgaccgtggccatggggagtgatcgtaacctagatacagattgtttaagaaaggttgttaagcggtgtagtcctagagaagaaaagggattatactggggatatacagtccgatatgcatcaaatttaagtcgtgctcttaagagttgcccatacaagagtggatatgatcatgtcattggaacttcagagcatggtcttgtggttaattcatcagatcttgttttacctacatttaggcaccttttaattacc

SEQ ID NO: 4609 - DNA, 423 bp, Lilium asiatic
  Clone ID: LIB3230-028-P1-K1-A5
aaagaggccaagggcaaatcctccggccctgtcatctccgatgatgcaatagagaaactgaagaaagaagtcgacaaggaaatgaccaacgcctacatctcaatgggccttcaagatgagcttcaagccatcaaggtggagttagccaagtcaccttccaagtcacctgaatccgtcagtccagcattgaaggaacgggttgataagctggtgcaacaattcaatacaaatctagcccaacccggagccttcatcaagttgaagcagaagctcgaactgttatcagactacaaccgagtgctggagcagagtgccaacagggataaagtcgagaaattcaagagagagatcaacgagaaactccaagaacaagtgaaaggaaagatggagatcttgaaaagggtacgcgataaggtggcaaag

SEQ ID NO: 4610 - DNA, 261 bp, Lilium asiatic
  Clone ID: LIB3230-028-P1-K1-A8
ggcccaagctcaagacccaccgcaggaaccagcggagggctgacaaggcatacaagaagagccatttgagcaaggtggggtagaaacccttcgctgtgacatcccatgccaagggcaaagtcctggagaagatttgtattgaggccaagcagcccaactccgctattcgcaagtgagctcgcggtcagcttggtaagaatggcaagaagattgctgtcttcgttccaaatgacggttgtttgaaccacattgtaggaaaat

SEQ ID NO: 4611 - DNA, 405 bp, Lilium asiatic
  unsure (1)..(405): unsure at all n locations
  Clone ID: LIB3230-028-P1-K1-A9
atgccgaagagggagctgagagaggcctccaaccaaatattatctctgttccaggataattatccggagatggtggcgaggaaggtgttcatcaatgctccatggtatttcagtatgctatactcgatgatcagcccgtttttaactgagcggaccaagagcaagtttgttattgccagagaaggaaatgtcgctgacactctctacaagtacataaggccggaatttgtgccggttcggtacggcgggttgagccggcccggtgaattgcagtccggcccgccgaagccggcgtcggagttcacaatcaagggcggcgagaaagtgaatctggagattgaggggattgagagtggggctactatcacttgngacatagtgggggggggatgggatgtntgagtt

SEQ ID NO: 4612 - DNA, 123 bp, Lilium asiatic
  Clone ID: LIB3230-028-P1-K1-B1
cttgatcaacagagagttcaatctcattatgtttagtttgaagtttcctatgtgtgtcttgatgtcatgttggtcttgtgattagatgcagcaggttgaactggttgtagacaacctttaatc

SEQ ID NO: 4613 - DNA, 363 bp, Lilium asiatic
  Clone ID: LIB3230-028-P1-K1-B11
gagagagtgagtgagaggagagaaagaaagatgtggaggaagtgtttgctctcccttgtgctggctcttgcactggctcaggcctgtgcgaggagccctccaggtcaagtcagtgtaagcacaaaccacactgacagcgccgctgccggcgttggtgatcaaaagaactttttctatgctggaggcattggcgggattgctggcgggggtgttcccggactcggctttggcggaggtgttcccgtcgttggtgctggagtcggtggtgttggtggcttgggtgggctcggtggtggcattggaggaactagcgggcttggggctggtaccggcaagtggtgccagtggcgggttacttccctt

SEQ ID NO: 4614 - DNA, 378 bp, Lilium asiatic
  Clone ID: LIB3230-028-P1-K1-B12
gccaagcgccaccggaaggtgctccgggacaacatccagggcatcaccaagcctgccatccgccgcctggctcgccggggcggagtgaagaggatcagcggcctcatctacgaggagacccgaggcgtgctgaaaatctttctcgaaaatgtcatccgcgatgccgtgacctacaccgagcatgcgcgccgcaagactgtgacggcgatggatgtggtgtatgctctcaagcgccagggccgcaccctctatggctttgggggttgatctagcactgttctctcttgggtctctgtttgtttattttcggtttggatggaagtctgttcttcatatttctcgtatgaaatgaggatggaatgggaaattgggttgtcg

SEQ ID NO: 4615 - DNA, 340 bp, Lilium asiatic
  Clone ID: LIB3230-028-P1-K1-B2
attggttttcgagccccatcggccatcgacgttgacgggaatgacggtgaatctgaacgggttggtgcctccgccgcagcaggaacccctgctggatgctcacacttaggcggcgtggggcgattccggagtcatttcccccttcgccttcttcaggaggtttggctataaataaggagggaagtgaaccatggaaaacccctctccacaccaagttctcttcattcaagtctacttcaagagagaagaaggaaaaaaagggatcaagggaggaatttgagaggagtaggagaagacttcaagtcattctcctatgatcccaaaccagaatacctggaga

SEQ ID NO: 4616 - DNA, 432 bp, Lilium asiatic
  Clone ID: LIB3230-028-P1-K1-B3
ccgcaacagaaaaatgagtacgattgtggcgtctttgtcctctacttcatggagcggttcatcgaagaggctccagaaagacttaaaataaaaaatctttcgtcgatgtttggcaaaagggggttcaagcccgggcaagcttctggcctgaggaaaccgattcgagatctacttgtcgaagaatttgagagtgctcgacttgagaaagccagaccagaatcaccggcagtctctagcagttcgtccgttgatacagatgaatttgatactcctttctgaacatagtaaaaagaaatggcccgcattggttttgcaaagttagtttcttcttttgttacatatagagaagtcggaggcagtggtttctagtgaggaaaatgtataggcatgcatatcgagttttcttgtttatttcattctgtgcctattttt

SEQ ID NO: 4617 - DNA, 193 bp, Lilium asiatic
  Clone ID: LIB3230-028-P1-K1-B5
cgagagagtgagtgagaggagagaaagaaagatgtggaggaagagttttctctcgggtgtgctggctcttgcactggctcaagcctgtgcgaagagcccttcaggtcaagtcagtgtaagcacaaaccacacttacagcgctcgttgccggcgttggtgatcaaaagaactttttctattcttaaagcattgg

SEQ ID NO: 4618 - DNA, 283 bp, Lilium asiatic
  Clone ID: LIB3230-028-P1-K1-B6
gccaagctccaccggaaggtgctccgaaacatcatccaggggattaccatgtctggcatcctccgtctggctcggcgttacggattgaagaggatcagctgcctcatctactaggtgacccgaggcgtgctgaaaatcttttctcgaaaatgtcatccgcgatgccgtgacctacaccgagcatgcgcgccgcaagactgtgacggcgatggattgtgtgtatgctcttaagcgccagggccgcaccctctattgcttttgggagttgatctagcactgttct

SEQ ID NO: 4619 - DNA, 363 bp, Lilium asiatic
  Clone ID: LIB3230-028-P1-K1-B8
cggacgcgtgggcggagagagatatctcgtgatttgtcacattggtatggtctttgaggtcaattggtgagttttggatttgaaacgttagttcgggaagtggtagcggaatcaaggagccaagtggtacagtaataactaataagggaagaatgtatcgaatttagggagtgaaacacgcaactttggtgaagagtaaaaccttcgggctcggtcatctattaagttcaatccgaagactcgacggcgagtaatatgcgtatgcatactctgtcaagtataccaataaaataagtaaatacacaagttgacatacacataacattgatgaacaattgtctgatttcacaaccagacaagcag

SEQ ID NO: 4620 - DNA, 392 bp, Lilium asiatic
  Clone ID: LIB3230-028-P1-K1-C1
gagagatgcaattttggccaagatagaagtttcccaggcacatcttgaattgcttaagcgtactaatgtgctgaacgatgcattccttatatggcatgatggagaatttggaaccatcaacaatttccgactggggcgtcttcctaagataccggttgaatgggacgagataaacgctgcttgggggcaggcatgtttgcttcttcacacgatggcgcaacatttccgaccaaaatttccataccgaatcaagattctaccaatgggcagttatccacgtattatggacaacaacggcaatacttacgaattattcggtcctgtcaatttgttctggagcactcgctatgataaagcgatgacattgttcttaacatgtctaaaagaatttg

SEQ ID NO: 4621 - DNA, 52 bp, Lilium asiatic
  Clone ID: LIB3230-028-P1-K1-C10
gccaagcgccaccggaaggagctccgggacaacaaacagggcagcaccaagg

SEQ ID NO: 4622 - DNA, 144 bp, Lilium asiatic
  Clone ID: LIB3230-028-P1-K1-C11
tccttgatgattttaaagatggtgtcatggaaaatgctgcatttgttcgtggggaacccccacacgatgacaataatcctccaaaagtttactcaaaattggaagtccttcacgagaaagttaagaaacaacttatcaagggag

SEQ ID NO: 4623 - DNA, 406 bp, Lilium asiatic
  Clone ID: LIB3230-028-P1-K1-C12
gccttgatgatgataaagatgtcgtcatggaaaatgctgcatttgtgcgtgatgaacccccacacgatgacaaagttcctccaaaagttgactcagaattggaagtccttcacgagaaagtaaagaaacaactcatcaaggaaggtcgtggtcagaaaccagcgaagttctcaacatgtttcttgcactatagggcgtgggttcaaagcactcaacacaagtttgaggacacctggcaagaacagcgacctattgaattaatcattggaaaagagaaaaacgaaatggctgggttgggtattggtgtatcaagcatgaaaaggggggagcgtgccctggtgcatgtgggttgggagttaggctacgggaaagagggaagcttttctttcccaaatgtgccacccac

SEQ ID NO: 4624 - DNA, 266 bp, Lilium asiatic
  Clone ID: LIB3230-028-P1-K1-C4
gccaagcgccaccggaaggtgctccgggacaacatccagggcatcaccaagcctggcatccgccgcctggctcgccggggcggagtgaataggatcagcggcctcatctacgaggagacccgaggcgtgctgaaaatctttctcgaaaatgtcatccgcgatgccgtgacctacaccgagcatgcgcgccgcaagactgtgaccgcgatggatggggtgtatgctctcaagcgccaggggccgcacccctttattggctttggggg

SEQ ID NO: 4625 - DNA, 411 bp, Lilium asiatic
  Clone ID: LIB3230-028-P1-K1-C6
ccgctctcgcttgggctggagacggctggaggagtcatgacagttttgattccgaggaatacgactattcctaccaaaaaggagcaggtcttctccacctactctgataaccaacctggtgtcttgatccaagtttatgagggtgagaggaccaggaccagggacaacaacttgcttggcaagtttgagctttctggcatcccccctgctccccgtggtgtgccgcagattacggtctgcttcgacattgatgcaaacggtatcctcaatgtctcagcggaggacaagaccaccgggctgtagaacaaaattaccatcactaatgacaagggcaggctgagcaagggggaaatcgagaagatggtgcaagaggcggagaaatacaagtctgaggacgaggagctcaagaga

SEQ ID NO: 4626 - DNA, 375 bp, Lilium asiatic
  Clone ID: LIB3230-028-P1-K1-C7
ctgagtctggaatgggtgccccaggtgagacttctgaagctaaaactagaagttatctcactgatgcccccaagggcctctctccaatggatgttagagggaagattgacaaggataaagtgaaggcagctctcgagaaacgtagaaaatctcgaggtgaggtggacaggaagatggatattatggatgatgatgacctcattgagagggagcttgaaagtggaattgaaatggctgccgaggatgagacgaccaagcaagagatgtatggcgagcatgaacagcattggcaggagcatcagaacccagatcgtgttaacgaggattgggaccatgggaccgatattgtgaatgctgaagaaggtgagctctcgc

SEQ ID NO: 4627 - DNA, 259 bp, Lilium asiatic
  Clone ID: LIB3230-028-P1-K1-C9
atgccgaagagggagctgagagaggcctccaaccaaatattatctctgttgggggataattatccggagatggtggcgaggaatgtgttcatcaatgctccatggtatttcagtatgctatactcgatgatcaatccgtctttaactgagcggaccaagagcacgtttgttcttgacagtaaaggtaatgtcgctgacactctctacaagtacataaagccggaatttgggcctgttccgtacagcggtttgagccccc

SEQ ID NO: 4628 - DNA, 427 bp, Lilium asiatic
  Clone ID: LIB3230-028-P1-K1-D1
agaaagagatgccctccggatcaagatgatgaaattttcgatgtggccacggatgcaatatctaagatgtaccaaaatgatgagctatcagatactgttcgcgtgcaatttatgtccttcgtagagaagaaggggaaattttcctctccaacagctaagcgagatgccagaaatccaaaaatcaatgttctgcagtggtggaagtttcatggaggtgacactaaggagttgagagatatggcattcagagttcttgcacaaccggttagcaccttatctgttgagagaccatggagtacctttagttatatccataatatgaaaagatatagagtaaatacgatctgggaagacgatctgatatatatccactcaaacttacgattgctatccaggtccaattcaaattataagtatgggccacata

SEQ ID NO: 4629 - DNA, 343 bp, Lilium asiatic
  Clone ID: LIB3230-028-P1-K1-D10
caacccctccgctgcgatgacgaccgttcccggctctctgatctgggagcttgtgaagaacaacaacgcgttcctggtgaagcagttcgggaatggcaacgccaaggtgcagtttagcaaggagagcaacaatctctataacgttcactccttcaagcactccgggcttgcgaataagaagacggtttcgatccagcctggggggaaggatctgtctgttgttcttgctacaaccaaaactaagaagcagaacaagcctgcagcgctgtatcacaggtcggtcatgaagaaagagttcagcaagatggcaaaggctgtcaagaatcaggtagcggacaactac

SEQ ID NO: 4630 - DNA, 391 bp, Lilium asiatic
  Clone ID: LIB3230-028-P1-K1-D11
caggcctccaataatatccccatttatgctcagattttgtgaataactgttctaaatttggcgacctccttatgaagcatagatatgtacatattggataagatacagatgatactggaatacatcaaaaataatgttatgatttatattttgtttgtgaaaaggcaatataataatttacaatcttctgtaatgctattcagtcctatataactatttttgataactaggtgaattttagaaggaaaagaaaaaaaaaatcagtgtttactaataataaaatcgaatatcatgcccatctcatgtgtagtcacaaaacataaagaagcgatgagtcagggcatcttgtccacaaaatctagaacagaaggcaccaaagcaatagttcaaa

SEQ ID NO: 4631 - DNA, 399 bp, Lilium asiatic
  Clone ID: LIB3230-028-P1-K1-D12
ggggctcgaatggttcgcgaactatttcagatggctcgctcgaagaaggcttgcatcgtcttttttgacgaagttgatgctattggtggggcccgctttgatgatggggttggaggcgacaatgaagtccaacgtactatgcttgagatcgtgaaccaactcgatggctttgatgctagaggaaacatcaaagttttgatggcaaccaatagacccgatacattggaccctgccttactgcggcctggacgattggatcggaaggttgagttcgggctgcctgatctggagagccggacacagatcttcaagatccacactaggacaatgaactgcgaaagggacgtgcgcttcgaacttgtcgcccgactctgccccaattcgaccggagcggacata

SEQ ID NO: 4632 - DNA, 212 bp, Lilium asiatic
  Clone ID: LIB3230-028-P1-K1-D4
gaacccgtgaagataaaaatagcgcgatcccgaatatctgatctgggagcttgggaagaacaacaacgcgtgccaggtgcatcaaaaagggaataacaactggaaggcgctcacgagaaaggaaagaaacaacttatataggaagggcgtggcaaaaaccaacgaagttctcaacatgtttcttgcactatagggcgtgggttcaaaagact

SEQ ID NO: 4633 - DNA, 301 bp, Lilium asiatic
  Clone ID: LIB3230-028-P1-K1-D5
cggattccggtcgccacgcgtcgaaaaaaaaaaattacagctctcggtatgctttttggcatgtggctcaactgggtaaacaaacctcctaatcaagtactttaattcggaatttgttgatatacaagatgggttggaaaagatgggaagttggggttttcttaatgtgcccggcattttccgaagaccaatgaagtttcattgttcccgaacgcctaaaggaattttttttttattttaaacttcttcttgacttataaaaaagtaaatatatttttgggaaaattaacttcactaaaac

SEQ ID NO: 4634 - DNA, 394 bp, Lilium asiatic
  Clone ID: LIB3230-028-P1-K1-D6
tcgaattaatattaattaattgaattaattaagagtaataattaaaattaaatctggagaaaattaatttcaaattagtaacttctattaatttttggttctttttattttcagatcgaaaaaagaaaagtcaagtcgatccaaagggggtccatggccaagggtaaagatgtaaggctcatagttatttaggaatgtacttgttgctgtgcccgaaatggcgtcaataaagaatcgccgggtatctctagatatattactcaaaagattcgacacaatacacccagccgattagaattgcgcaaattttgtcgttattgtctcaggcatacgattgatggggaaataaacaattagatcgtacggaacatatgtgcaatctttccattccaac

SEQ ID NO: 4635 - DNA, 409 bp, Lilium asiatic
  Clone ID: LIB3230-028-P1-K1-D7
cgcgtccgctcctggatgcggcatcacttgttgctgcgattcgcggcaccgctggcgttttggtgtggcgtcgccctgcatcgtcgatagtgtcgaggatccagagggggagctgttggatccggcagtgaaggggacactcaatgtgctccgtgcggcaaaggagtgtgggatcgggcgggttgtggtgacttcatcaatctgcgccatcaaccgcagccccggctggccggacaatgccatcaagaatgaggaatgctggactgatgtggattactgcaagcaaaacggggtgtggtacccagcttcaaagacattggctgagcgggcggcgtgggaatttgctgaggagaatggactggatatggtagtgatcaatcctggcatggggatgggtcctatcattcca

SEQ ID NO: 4636 - DNA, 321 bp, Lilium asiatic
  Clone ID: LIB3230-028-P1-K1-D8
gtcggacgcatcacagatgattcctcaacataattacaagcttgatgctcatgctttaaatagccgtcatcctggagagtttgaatgcagagaatttagagaatcaattcttggagtgatgcctcatcattgggataggagagaagatacatctttcgagctatcacacttcagaaggcacaaacgcaaaacgttgaagaaaatgcctgggaaagttatgacaagcgtttaccattaacccgtggaaaacaatccccctgggaaaagatcatcaaataaaattgcaaggttaattgataaagccgcaaatttggctggttc

SEQ ID NO: 4637 - DNA, 422 bp, Lilium asiatic
  Clone ID: LIB3230-028-P1-K1-E10
cggacgcgtgggcaagatcacgaagacagattcttaagatcgggagtatatcttgttttggagaagctagagctccaagtttatcaaagattggtaaaaaagatttatctcattcagaaacagaaggaccctagcaaagcacatcaagtaaagttggaagtgatactcaaggctttgaagtggcttcaagtggacatggatcttgatgaggttgagtgcatagtggctattctcatatataagaatctcatgaaaggttactttgctcacaagagcaaagttgtcgtccttagcaaacaagacccgttcccgaaattgaacggcaagcccgtgaacgcgtagtctgatttttctcttaactgggcgatgtataaatatttttgtaaaataataattaattagtgctggtagggtttgaatcc

SEQ ID NO: 4638 - DNA, 424 bp, Lilium asiatic
  Clone ID: LIB3230-028-P1-K1-E12
agttgaatctgacacacgctcactctctgctgacttatccggtaaacccccgggttccacggatctgatcaccgcagatataagataacggggcgccgctctgccgatcatttcaccaattgagcaacgatgtcgggcttgatggagaaggcgaaggagttcgtggcggacaagatcgcccatgtgaagaagccggaggcgagcgtcttcgacgtctccttcaagagcgtcacccgcgactccgtcctcctgcacgctgaggtttcagtggataatccttattcccaccgcctgccgatctgcgagctctcctacactctcaagagcgccgacagggtggtggcatcggggacaatggccgaccccgggtggattgaggcatcggggctgacaaagctggaactgccagtgaagctgctgcaca

SEQ ID NO: 4639 - DNA, 424 bp, Lilium asiatic
  Clone ID: LIB3230-028-P1-K1-E2
cggacgcgtgggtccgagctccgccctcgccgccgcttcagatccggcgatcctgccggagccctagccccggcatcgtccactgcccgcggcgggaatctcgagatttgttgatgattgaagtttgaggctgatcttgtgagtagtggaatcatggtgttagttctagcgctaggtgatctccacatcccccatagagcggctgatctgccggctaagttcaagtcgatgctcgtaccggggaagatccagcacatcatatgcacggggaatctttgtattaaggaggtgcatgattacttgaaaagcctttgccctgatctgcatatcacccgaggggaatatgacgaggatgctcgatatccagagaccaagactctgactattggacagttcaagcttggactctgtcacggccatcagg

SEQ ID NO: 4640 - DNA, 425 bp, Lilium asiatic
  Clone ID: LIB3230-028-P1-K1-E4
ggttacttcgctggaaatgttagtcctgcaaggatggacttccgctggtttgccttaggtaactgtattgccattttatcatctctcgcaaccccagagcagtctgtagctataatggatcttatagaatcacggcgggaagaactggttggtgagacgcccttaaagatagcttatcctgccattgagaatcatgaatggagaatcatgacaggtcgcgaccccaaaaatacccggtggagttaccataatggaggatcttggcctgtacttctctggttgctgactgcagcctgtatcaagactggccggccacagatcgccagaaaagcaatcgaacttgctgaaagccgtctgttgaaggatagctggcctgaatattacgatgggaagatcggtcggtacatcggcaaacaggccaggaa

SEQ ID NO: 4641 - DNA, 375 bp, Lilium asiatic
  Clone ID: LIB3230-028-P1-K1-E5
cggacgcgtgggggaggttctgattatctaggaaagggtgtttccaaggctgttgagaatgtgaatgccatcattggtcctgcattgattggaaaggatcctaccgagcaggtccagatagacaatttcatggtgcagcagctcgatggaaccaaaaatgaatggggctggtgtaaacaaaagcttggtgcaaatgccatactggccgtgtctcttgctgcatgcaaagcctgagccagtgtgaagaagattcctatataccagcatattgccaaccttgctggaaataagaacttggtacttcctgttcctgcatttaatgttatcaacggagggtcgcatgcaggaaataagctggctatgcaggagttcatg

SEQ ID NO: 4642 - DNA, 220 bp, Lilium asiatic
  Clone ID: LIB3230-028-P1-K1-E6
agttgaatctgacacacgctcactctctgctgacttatccggtaaacccccgggggccacggatctgatcaccggggatataatataacggggcgccgctctggcgatcattttaccaattgagcaacgatggcgggcttgatggagaaggcgaaggagttcgtggcggacaagatcgcccatgtgaagaagcccgaggcgagcgtctccgacgtcttct

SEQ ID NO: 4643 - DNA, 363 bp, Lilium asiatic
  Clone ID: LIB3230-028-P1-K1-E8
cggacgcgtgggcgccctttttttttttttttttttttgccggcactttgcttttactggtttgaagatggcttactccaatcatgaaaaacaaaaagtaacaaattaattttttttaaagagaaaatatcgcaataagatatataatgcatcaacctgctgataaataaaactacatatccaggccctcggaacccgaccgtctcctcactccttgtcgccactcccaccttccgacgcagcaactttgaccacgatgatcctcccgtcgagttcatgctcgttcatcccttttatggcgttcttcatcgactgctcgtcggaaaacaacagaaacccaaacccctgagactggcctgtttt

SEQ ID NO: 4644 - DNA, 420 bp, Lilium asiatic
  Clone ID: LIB3230-028-P1-K1-F1
agcagttcggaatccacaaacaattccgaccgacggtcagaatttcttcgaatatgtccttgaatttattcgagacttgagtaaaactcagattggagaagaatatggcccttgggttccctttattggaactatgttcctatttatttttgtttctaactggtcaggtgctcttttaccttggaaaattatacagttacctcatggggagttagctgcgcccacgaatgatataaatactactgttgctttagctttactcacgtcagtggcatatttttatgcgggtcttaccaaaaaaggattgggatattttgggaaatacatccaaccaactccaatacttttaccaattaacatcctagaagattttacaaaacctttatctcttagttttcgactttttgggaatatattggc

SEQ ID NO: 4645 - DNA, 283 bp, Lilium asiatic
  Clone ID: LIB3230-028-P1-K1-F11
cgcatttataagatgcagatctttgtcaagacactcaccggcaagaccattactctggaagttgagagctctgacactattgacaatgttaaggccaagatccaggacaaagagggcatgcctccggatcagcaacgcttgatcttcgccggaaagcaacttgaggatggtcggaccctggccgactacaacatccaaaaggagtctaccctccaccttgtcctccgcctcaagggaggtatgcagatctttgtgaagaccctcaccggcaagactatcactc

SEQ ID NO: 4646 - DNA, 416 bp, Lilium asiatic
  unsure (1)..(416): unsure at all n locations
  Clone ID: LIB3230-028-P1-K1-F12
agagcacctttcaaattcgatgggattatttcttcagaaaacaaacatcatcagggactatttggaagatataaatgagataccaaaatcacgcatgttttggcctcgtgctatatggagtaaatatgttgacaaacttgaggatttgaaatacaaggagaattctacgcaagctgtgcaatgcctgaatgacatggtaactaatgccttgtcgcatgctcaggactgcctcatatacttgtctgatcttaaagatctttccaactttcgattttgtgccatcccccagatcatggctattggaacactagctctatgctataataatgnggagatttttagaggagttgtcaagatgcgacgtggagtttgtgctagggtcatggaccaaacaagaacaatgtctgatgtctatg

SEQ ID NO: 4647 - DNA, 430 bp, Lilium asiatic
  Clone ID: LIB3230-028-P1-K1-F3
cggaagtctgctccggccacaggcggcgtgaagaagccccaccgcttccgccccggaactgtggctctccgtgagatccgcaaataccagaagagcactgagcttctcatccgcaagcttcccttccagcgccttgtccgggagattgctcaggacttcaaagccgatctccgattccagagctcggcggtgtcggcgctgcaggaggcgtcggaggcctaccttgttgggttgtttgaggacaccaacctgtgcgccattcacgcaaagagggtgactatcatgtcaaaggacatccagctcgccaggagaatccgcggcgagagggcttgatttgtttctaattcgctactcgcgaaaatgttgggaaaggatttctgttatctttggttgtaatttggtggattagccttggtatcaaatttttggg

SEQ ID NO: 4648 - DNA, 426 bp, Lilium asiatic
  Clone ID: LIB3230-028-P1-K1-F4
cggacgcgtgggcaaagggatgaggttgctggcgatgggatccccttctcccgctgttcccgccctacccatctcaaattcatcgtcagtcgagtcgagccagcagctggcggcgcctcttaccccatctcacaaatggcggttggtgatagcgtacgatggaaccagattctctggctggcactatcaacaagcgccaccaacagtgcagtttctcatagaaaaagcattgttacgcgtcacaaaactcgatagaaaggaactgtgtttagttggtgcaagcaggacggacactggtgtacatgcctggggtcaggttgctcactttggtactccttttgcgtatgatgggttggaaagtcttcatgcgggagttaacgggcttctccctcccgaaatccgagtgagagaaataagtccagcacc

SEQ ID NO: 4649 - DNA, 428 bp, Lilium asiatic
  Clone ID: LIB3230-028-P1-K1-F5
ccaatttcaagatgcagatctttgtcaagacactcaccggcaagaccattactggggaagttgagagctctgacactattgacaatgttaaggccaagatccaggacaaagagggcatccctccggatcagcaacgcttgatcttcgccggaaagcaacttgaggatggtcggaccctggccgactacaacatccaaaaggagtctaccctccaccttgtcctccgcctcaggggaggtatgcagatctttgtgaagacccttaccggcaagactatcactcttgagggtgagagcttcggcaccattgataatggtaaggctaagattcaggacaaggagggcattcctccggatcagcaaaagctcatctttgctgaaagcaactggtaggcggtcgcccactggctgactataacattcagaagg

SEQ ID NO: 4650 - DNA, 380 bp, Lilium asiatic
  Clone ID: LIB3230-028-P1-K1-G1
cgacattgatggccgagattgggacagaagagagccagagattatttgtcgacatcttgaccatgtgaacttgatgggtctcaacaaaacgacttcacgactgcgatttctgattaactggcttgtgacctcgttactacagttgcgcctaccagattctgatgggggagatggggagccgcttgtcgtcatatacggtccaaagataaagtatgagaggggtgcggctgtggccttcaatgtgaaggatagtaccggtgtgttgattaaccctgatactattcagaagatggccgagaataacggtatctccttgggtgttggatttcttagtcatatacggataatggagaatcagaaacagaatcagaaacagcttc

SEQ ID NO: 4651 - DNA, 394 bp, Lilium asiatic
  Clone ID: LIB3230-028-P1-K1-G10
ggcaagtgatcttcgatcatctcttgaaagatctaaggatggattgctgaatattacgctgtatatcagctatcttgcggactatattgtggagcttgaccatgaaaatgtcaccgggcctgtgggcttccttgcggatgttggtggtctttatgctttaagtgttgcaattttcctatacttcttggtgcaatgtgaggtaaggagtaagaaattgcgtaacgaggatactgtcatgcgaaacattagaagtcagagacgtgctctacgaaattggaataagttgaggaaatttgtcatgtacacctgggggcctagcaacctggatggagaaaataattgggtcaaacggcaaggaggtatgaagacggattcttgttggggaattagatct

SEQ ID NO: 4652 - DNA, 394 bp, Lilium asiatic
  unsure (1)..(394): unsure at all n locations
  Clone ID: LIB3230-028-P1-K1-G12
ctcactgccgcctctgctctcgcgatggcggggttcatagctcgacaaaccatccaagctctccgatccaagccctcggttcgagcaggacaagttgcacaaggtttcaataatcacttacaaggactcaattcacatcgtttctcaacagcaaaagaggatgaggagagagagaaacttgccaaggagatgggcaaagactggagttctatttttgaacggagtatcaatactttatttttgactgaattggtccggggactaaatctcaccctcaagtacttttttgagcagaaagttactataaattatccctttgagaagggcccactgagccccncgtttcgtggagaacatgctcttcggcgttatccaaccggagaggagcgctgca

SEQ ID NO: 4653 - DNA, 384 bp, Lilium asiatic
  Clone ID: LIB3230-028-P1-K1-G4
agagcacctttcaaattcgatgggattatttcttcagaaaacaaacatcatcagggactatttggaagatataaatgagataccaaaatcacgcatgttttggcctcgtgctatatggagctaatatgttgacaaacttggggatttgaaatacaaggagaattctacgcaagctgtgcaatgcctgaatgacatggtaactaatgccttgtcgcatgctcaggactgcctcatatacttgtctgatcttaaagatctttccaactttcgattttgtgccattccccagatcatggctattggaacactagctctatgctataataatgtggagatttttagaggagttgtcaagatgcgacgtggagttgttgctagggtcat

SEQ ID NO: 4654 - DNA, 426 bp, Lilium asiatic
  Clone ID: LIB3230-028-P1-K1-G5
tttcgaattcacctcgccggcaatgtcaggccgtggcaaaggcggcaaggggctcggcaagggcggcgccaagcggcaccgcaaggtcctccgcgacaacatccagggcatcaccaagccggccatccgccgtctggctcgccgcggcggcgtgaagcgcatcagcggcctcatctacgaggagactcgcggcgtgctgaagatctttctggagaacgtgatccgggatgcggtgacctacactgagcatgctcgccggaagactgtgacggcgatggatgttgtctatgctctcaagcgccaaggccgcaccctctacggcttcggtggttaaaagagtttgaatctttataaagtcttgctggcaagaactgttctctggtttaatttccattgtctttgtttcagaggttttttattatcaat

SEQ ID NO: 4655 - DNA, 405 bp, Lilium asiatic
  Clone ID: LIB3230-028-P1-K1-G6
ctcactgccgcctctgctctcgcgatggcggggttcatagctcgacaaaccatccaagctctccgatccaagccctcggttcgagcaggacaagttgcacaaggtttcaataatcacttacaaggactcaattcacatcgtttctcaacagcaaaagaggatgaggagagagagaaacttgccaaggagatgggcaaagactggagttctatttttgaacggagtatcaatactttatttttgactgaattggtccggggactaaatctcaccctcaagtacttttttgagcagaaagttactataaattatccctttgagaagggcccactgagccccccgtttcgtggagaacatgctctttggcgttatccaaccggagaggagcgctgcattgcttgcaag

SEQ ID NO: 4656 - DNA, 384 bp, Lilium asiatic
  Clone ID: LIB3230-028-P1-K1-G7
gtcacgcaactccagccgatccagccgccaaatcgaactccccagctatcttcagaatgtctcgccgatacgatagccgaacaacgatcttttccccggaggggcgtctctaccaggtggagtacgcaatggaagcaatcggtaatgctgggtcagcaattgggatcctcgccaaggacggtgttatcctagtcggtgaaaagaaagtgacctccaagctgctccagacctccaagtccaccgagaaaatgtacaagattgacgaccaccttgcctgcgcagtcgccggcatcatgtctgacgccaacatcctcatcaacactgctcgtgttcatgcccaacgctacactgtcgcttatcatgagccgatgccagtagagcaac

SEQ ID NO: 4657 - DNA, 393 bp, Lilium asiatic
  Clone ID: LIB3230-028-P1-K1-G8
gagagagagaatccacatcctcttcgctttcgatagaggagattcgacctgatcgcagcagcaatggtggcttcgagctcgtggtcgacggcgctgacgcggatctcgccctacacgttcgcctcgaccgggatcgcgatctcgatcggcgtctccgtcctcggcgctgcttggggaatttacataacggggagcagcttgattggtgcggcgatcaaagccccgaggatcacttccaagaatctcatcagtgttattttctgtgaggctgttgccatatacggcgttattgttgcaatcatattacagacgaagttagaaagtgtgccagcatctcagctatatgctgcagagtctatgagggctggatatgcaatctttgctttcgggatc

SEQ ID NO: 4658 - DNA, 394 bp, Lilium asiatic
  Clone ID: LIB3230-028-P1-K1-H10
ctcactgccgcctctgctctcgcgatggcggggttcatagctcgacaaaccatgcaagctctccgatccaagccctcgattcgagcaggacaagttgcacaaggtttcaataatcacttacaaggactcaattcacatcgtttctcaacagcaaaagaggatgaggagagagagaaacttgccaaggagatgggcaaagactggagttctatttttgaacggagtatcaatactttatttttgactgaattggtccggggactaaatctcaccctcaagtacttttttgagcagaaagttactataaattatccctttgagaagggcccactgagcccccggtttcgtggagaacatgctcttcggcgttatccaacccgggaggagcgctgca

SEQ ID NO: 4659 - DNA, 132 bp, Lilium asiatic
  Clone ID: LIB3230-028-P1-K1-H11
ctacgacccttgtactccccatctcggatcaactcatgttcctgaaaacactgattctgaagagggtggtccacggcaaaataaaggctcatattcccgacttaagcttgcgttcgacattttgcatcatca

SEQ ID NO: 4660 - DNA, 344 bp, Lilium asiatic
  Clone ID: LIB3230-028-P1-K1-H12
cccctcgtcctccccatctcggaacagctcatgttcctgaaaacactgattctgaagagggtgttccacgtgaaaataaaggctcatattcccgtcttcaagcttgcgttcgaccatttctgcatccatgcaggtgggagggctgtgctcgaccagcttgagaggagccttgtgctgagcagctggcacatggagccgtcaaggagcactctgtgtcggtttgtaacacttcaagcagctcattgaggtatgagattgcttactgtgaggcctatgtaaggatgatggagggtgccagagtgtggcatatagcgttcggttcctgatttaagtgtaacagtaca

SEQ ID NO: 4661 - DNA, 321 bp, Lilium asiatic
  Clone ID: LIB3230-028-P1-K1-H3
aaaaaaaaacctactaaaaagattaaaaaaaataaaaaaagggtaacaaagaaaaaaaaaatcaaaaaaataaaaaaaagaaaaaatcaaaaaataaaaaaaaaaaaaaaacaaaaaaatcagcaaaaataacaaacataaaaaaaaataaaaaaaaaaaaaaaaacaaaaaaaaaaaaaaaacaaaaaaaaaaaaaaaaaacaaaaaataacacaaaataataaaaacttaaaaaaaaaaataaaaaaaaaaagtaaaaaaaaaacaagaaaaaaatatctgaaaaaaaaaaaatgaaaaaacaataaataaaaaaaaaa

SEQ ID NO: 4662 - DNA, 247 bp, Lilium asiatic
  Clone ID: LIB3230-028-P1-K1-H4
tcgctcactgccgcctctgctctcgcgatggcggggttcattgctcgacaaaccattgaagctcttccattcaaggcccttggttcgagcaggacaagttgcacaaggtttcaataatcacttacaaggactcaattcacatcgtttctcaacagcaaaagaggatgaggagagagagaaacttgccaaggagatgggcaaagactggagttctatttttgaacggagtatcaatacttttttttgg

SEQ ID NO: 4663 - DNA, 58 bp, Lilium asiatic
  Clone ID: LIB3230-028-P1-K1-H6
aaaaaaaaaaaaaaaaaaaaaataaaaaaaaaaaaaaaaaaaaaaaaaaaaaaaaaaa

SEQ ID NO: 4664 - DNA, 454 bp, Lilium asiatic
  Clone ID: LIB3230-029-P1-K1-A1
gaatgctttgcatcatgcctcttcatttgttatgacctgatccgtcctgatgtggcactagagctagcttggatgaacaatatgattgattttgctttcccatacctcttgcagtttatccgtgagtatacgagcaaggtggatgagctcgtgaaaagtaaactcgaagcacaaaatgaagagaaagtcaaggaaaaggaagaaaaagacatggttgctcagcagaatatgtatgcgcagttgctgcctcttgcattaccagcacctccaatacctggcatgggaggagttggtggtcctttcgcaggtccacctccgatggggatgcctcctatggggatgccggcgatggctcaatatggcatgcccccagtgggctattagggttgggcgatggtgatgttcaagaggataactcatgaaacatcggtttcgtactgagtgcagtgacaaa

SEQ ID NO: 4665 - DNA, 369 bp, Lilium asiatic
  Clone ID: LIB3230-029-P1-K1-A10
aatttagacagtagctgaccagggagggagatggctctcactgctgcaaccgagctaatccatctccgtcaatccccatcgccggcgtctcgatgcttcccaactccgctcaaccagaacactagaacgttgatctccttctcctcttcgatccgtgctcctccaacaagcttgatctgcacgggaaccgggcggtcgccgtccgcagtcgccgctggacctcgccccctgatgggatcgatgacaaacgtcaagggcctgcgatttgcagtggttgttggacggtttaaccagattgtgacaaatttgctactggagggagctcttgagacttttagacgatattccattcaagaagatgatattggt

SEQ ID NO: 4666 - DNA, 410 bp, Lilium asiatic
  Clone ID: LIB3230-029-P1-K1-A12
gcagctgctggtggaaccggacaatttgcagttcaactagcaaagttggcggggaataaagtggtggcaacgtgtggcggtgaaagtaaagctgcaatgctgagatcctttggagttgatcgagtcattgattataagaaggaaaatattaaggctgtcctgaagaatgaatttccaaagggtgttgatatcatctatgaatctgttggtggagaaatgtttgatctttgcttaaatgcactagcagttcatggacgactcattgttattggaatgatatctcagtatcaaggagagcatggatggaaacccttgcatatacacagatttgtgaaaagattcttgcaaaaagccaaactgtggctggattttttctgggtcagcatgggcactctgtggaacaacatatg

SEQ ID NO: 4667 - DNA, 433 bp, Lilium asiatic
  Clone ID: LIB3230-029-P1-K1-A3
gccagaaatatcttaaaccacatttgcagcctgatgaaatttcagtgtggctgaaggagtacacggatggtagcttaaagccgttcaaaaagtcggagccgatccctgaaactaatgatgaacctgttaaggttgttgtggctgacaacattcatgatgtggtctctacctctgggaagaatgttcttattgaattttatgcaccttggtgtgggcattgcaagaaactagcgcctatcttagatgaagtagctgtctcatttcaagatgatgctgatgtgatcattgcaaagatggatgcgactgctaacgatctaccaaatgaatttgaagtcaagggttaccctacattgtacttttcttcagccagtggcaagctcacccaatacgatgggggtagggcagcaaaagacataatttgtttcatacaagc

SEQ ID NO: 4668 - DNA, 426 bp, Lilium asiatic
  Clone ID: LIB3230-029-P1-K1-A7
gaatgctttgcatcatgcctcttcatttgttatgacctgatccgtcctgatgtggcactagagctagcttggatgaacaatatgattgattttgctttcccatacctcttgcagtttatccgtgagtatacgagcaaggtggatgagctcgtgaaaagtaaactcgaagcacaaaatgaagagaaagtcaaggaaaaggaagaaaaagacatggttgctcagcagaatatgtatgcgcagttgctgcctcttgcattaccagcacctccaatacctggcatgggaggagttggtggtcctttcgcaggtccacctccgatggggatgccttctatggggatgccggcgatggctcaatatggcatgcccccagtgggctattagggttggcgatggttgatgttcaaaaggataactcatggaaca

SEQ ID NO: 4669 - DNA, 426 bp, Lilium asiatic
  Clone ID: LIB3230-029-P1-K1-A9
catttgctcatcggaaagaagcagagcaagatgttgcaaaaattgcacttgagggtatatctaagagtattaagactgaagacttttcattgatacctgaggacttcatattttgcaaatctaccctttatgagtattcagtcaagatgaatcttccaaatgcaaaatacacgacttcaacagaagcagggtttcttcccagtttcgtatcatctgtgaattttgatggaaaaacgtatgtaggttatactggaaagaacaagacagaagcagatcagcttgcatcacggtctgctattgagtccattttagcaaactctagtacaaagactggcctgtctaaaattataaaatctaagcgttaagttgtatgcaccaccgcataaaggctgtgggccaggatcattacaagaatgaaaacttgcc

SEQ ID NO: 4670 - DNA, 440 bp, Lilium asiatic
  Clone ID: LIB3230-029-P1-K1-B1
catttgctcatcggaaagaagcagagcaagatgttgcaaaaattgcacttgagggtatatctaagagtattaagactgaagacttttcattgatacctgaggacttcatattttgcaaatctaccctttatgagtattcagtcaagatgaatcttccaaatgcaaaatacacgacttcaacagaagcagggtttcttcccagtttcgtatcatctgtgaattttgatggaaaaacgtatgtaggttatactggaaagaacaagacagaagcagaacagcttgcagcacgggctgctattgagtccattttagcaaactctagtacaaagactgtcctgtctaaaattataaaatctaagcgtaagttgtatgcaccaccgcataaaggcagtgggccaggatcatcacatgaagaaaaactggcccagtcaccttaatca

SEQ ID NO: 4671 - DNA, 414 bp, Lilium asiatic
  Clone ID: LIB3230-029-P1-K1-B10
gaaaagagagcgagttgggaatcgggaaacttggatcgccggccgccatggagatgtcgcaggaggacttcgatcgcatcctctctttcgaccaagctcgccgcgattccgaggctctgtacgccgtcaatcccgacgacgccgacaatctcacccgatggggggaggcgcttctcgagctatcacatgtccaagatgccgactgttgcgtggagatgatagaagacgctgtttcgaagctggagaaggcgttgctggtggacccgacgaagcacgagacgctctggtgtctcgggaatgcacacacctcccgtgggttctgcacggcggaacatgatctggccaaagtctatttcggatttgctgctcaatgctacgagaatgcgttgcaggagggccctgaaacaagatgtt

SEQ ID NO: 4672 - DNA, 325 bp, Lilium asiatic
  Clone ID: LIB3230-029-P1-K1-B11
gccgccgcctaccgctatatgtccaaggccgtcccgacccggccgaccttcctcgttgacacactcgccatagtccggggtatggaggcgcgtgggattgaatcggagcatgccgagccataacggcggcaatcacgaaggggatgaatgatttgctggagagtgtcggcaagtcttttgtgtcccaggatcagatgcagaagagtgagaataattgggatgcggacttttctaaatttaagtcggagatctcccaggaacaacattccttttcattgcaacgatcgagcaacaaactgggagcaaatattgatcaactctactg

SEQ ID NO: 4673 - DNA, 420 bp, Lilium asiatic
  Clone ID: LIB3230-029-P1-K1-B12
gcgttcttgtattggttgtaaaatgcaaaattcactgccctcccatttccaacgagtacttctacttctagtgctttatttgatcttgtccactctgacatttggggacctgcacccataccttccttttctggatataggtattatgcgagttttattgatgactactctcgctacacatggatttaccttctaaagcagagatcgaaaatcgctcaggtttatgagtcctttacatccatgatatttactcaatttaaggctagaataaaaaaaattcgttctgattgtgctcgtgggtacttatcatcctctatgtgctcccttttgtccactcatggtggccctgggtcgagggggcaggtgactcaagtgagggtcaaagtcctaggtgactcagaccgcatgatcatgaggaat

SEQ ID NO: 4674 - DNA, 381 bp, Lilium asiatic
  Clone ID: LIB3230-029-P1-K1-B7
cgctcgcaccgttttctagggtttcattactgccgcctctaggtttttgctctccgaacgatcaaagatgcctctcccgaacgacattgatctgctcaacccgccggccgatctcgagaggaggcggcataagctcaaacgcctcgtgcagtcacccaattcattcttcatggatgcgaagggccagggatgtttcaacataacgactgtgttcagccactctcagactgcggttgtctgcggtaactgtcagggcgtgctgggccagccgactggtggcaaggccaggcttaccgagggaagctcctttcagctgaaggcaggatcgagctcggctatggtctgttctcttagcactcactccccaatccctccgcggat

SEQ ID NO: 4675 - DNA, 377 bp, Lilium asiatic
  Clone ID: LIB3230-029-P1-K1-B9
gcgtagaaatgtggacatcgttgtccaaagctgggaaagctccatatagtagccaaggctggctaatggatggtcgaatatgaaaagcaaatgtcagcttacaacaagaaacatgaaatgcggcctgacagctgaagctgatgaggaagaggaagagggatctgagcaaagtgcacaggatgaggtcgaagaagagaccgatcatgcactctacgaagatgatgagtgaccgcgtccatcgattttcactgaaggctgacgtcaaggcattgccttaaactttgatcatgtacaatggtttctagagtcatacaaatattgtaaaagaggtgacatttttcagctctttgacttgcatttcatttgatgatggatta

SEQ ID NO: 4676 - DNA, 361 bp, Lilium asiatic
  Clone ID: LIB3230-029-P1-K1-C1
gagaaaagtggaaatcgttgtccaaagctgagaaagctccatatgaagccaaggctgcaaaaaggaaggttgaatatgaaaagcaaatgtcagcttacaacaagaaacaggaaagcggggctgaggctgaggctgatgaggaagaggaagagggatctgagcaaagtggagaggaggagggggaagaagaggaggatgatgaagacgaagaagatgatgagtgagagcgtcgatcgcctttcacttaaggttgtagttgatccatgggctcaaatttgtatcatgtacaatggtttctcgggtcaaactaagattgtaaaagatgtaacatttatcagtactatgcttgcatgtcaagttt

SEQ ID NO: 4677 - DNA, 65 bp, Lilium asiatic
  Clone ID: LIB3230-029-P1-K1-C12
aaaaaaaacaaagacaaaccgaaaaaaaaaaaaagacaaacagaaagggaggaaggaaggaagag

SEQ ID NO: 4678 - DNA, 220 bp, Lilium asiatic
  Clone ID: LIB3230-029-P1-K1-C3
attgctgccaggcggactggccggctcaggggacaggctgctgcaactgctgccaaagagaaggcttaggaaaggttcggttattttacttgttggtttatttcagttcgagctgagtagtttttatttcaaggactattgtgtctaggagatctatttttggttattgcaaattgtgctactcctaattttatggtatgtgaaccctacttgttctatt

SEQ ID NO: 4679 - DNA, 436 bp, Lilium asiatic
  Clone ID: LIB3230-029-P1-K1-C6
tagccctcgtcccctggacgtctccatccactctcccccaatccgaagctcgacgatggccgtcgagaccgacgacgatctgatccttaaggccttcttcgccgaggtaagcgaagtggagcgggacaacgaggtcctcaggatactttcgtgcttcaaattgaatccttttgagcatcttaatttaccttttgattcttcacccgatgatgtgaaaaggcaatacagaaagttgtcattgctggtgcatcccgacaaatgcaagcatccgcaagctaaggatgcctttggagcattggcgaaagcacagcagctgttacttgatacacaagaaagagaatatcttcttactcaaattaatgctgcaaaagaggagctcagggcaaagaggaaaagagaattaaaaaaagataatgcttctaaaatcaaatcactt

SEQ ID NO: 4680 - DNA, 173 bp, Lilium asiatic
  Clone ID: LIB3230-029-P1-K1-C8
gaatgctctattacatagagatgtgaaaggagtataaagtgtattgtcctgtatacggactgcagaaatgttaacttgaattctcagatgcttttaagattttcaatttttttttcccatgaaaaaaaaaaaaaaaaaaaaaaattgcagaacataaaaaattatacagaaaa

SEQ ID NO: 4681 - DNA, 440 bp, Lilium asiatic
  Clone ID: LIB3230-029-P1-K1-C9
atcacgttttgacctgttatggctaattctggatcgtgctgacatggacagtgaccttgaaatggcaaggcatgttgtccatgtgcaccaacaccttgaatctccttctcttggattttcgccacttgaaccatctgttcttcgagcttatatttcagcagcgcgaaaagtaatcccttctgttccaagggcgcttgaggaatacatatctactgcatattctagcattcgccaggatgaagccaaatcgagttcaccgcattcttacacaactataagaacactgctcagcattcttcgtatatctattgcactagcaaggcttcgcttctctgactctgttgctcagagtgatgtggatgaggcgttacggttgatgcagatgtcgaagttctcactgtactcggatgatcgacagagatcgggtctagatgcaatat

SEQ ID NO: 4682 - DNA, 419 bp, Lilium asiatic
  Clone ID: LIB3230-029-P1-K1-D1
cggacgcgtgggcttatcaagctacaattcagggttttgtgtccaaaggcttttctgaggaagaaagtgcaaccttgttgcggaggagtgtggaaattgcttgtgaagctcgggatatatttcaggataaatgttcaaaagattcaagaggatgtcctgttttggtggcagcatctattggaagctatggagcgtatttagcagatggttccgaatatagtggggactatggcaaagctgttacgttggaaactttgaaagattttcataggaggagacttcaggttctttcagaagcaggtgctgaccttattgcttttgaaacaattccaaataagatagaagctcaggcctatgttcaacttctggaagaatgcaacataaatatcccagcttggttttctttcaattcgaaagat

SEQ ID NO: 4683 - DNA, 351 bp, Lilium asiatic
  unsure (1)..(351): unsure at all n locations
  Clone ID: LIB3230-029-P1-K1-D11
aaaaaaaaaagaanaaaaaaaaaaaaaaaaaaaaaaaaaaaaaagaaaaaagtanaaaaaattaaaaaaaaaaagaaaaaaaaaagagaaaaaaaagnnnnngnnnnanaaaanggaaaaaaaaaaaaaaaaaaaaaaaaaaaaagaaaaaaaaaaaaaagaaaaaaaaaaaaaaaaaaaaaaagaagaaagaaagaggaaaaaaaaaaagaaaaaaaaaaagaacatacaaaaggaagagaaaaaaaagaaaaaaaaaaagaaaaaaaaagaaaaaaaaaaaaaaaaaagggaaagaaaaaaaaaaaaaaaaaaaaaaagaggatagaaaaaaaaggaaaaaaagaaaaa

SEQ ID NO: 4684 - DNA, 323 bp, Lilium asiatic
  Clone ID: LIB3230-029-P1-K1-D12
aaccaaaatatctgctacaattaaagaagagcataagcatgtaccaaaacataacatcaaaccccaatcatccaaatgatccacaaacaccacacaattcccaaatgaaaggtctcaacaagagtatccaatcaactaagtctcataaaaaacagtaaataggaaaatgataacataaccctagctccagcagcacagatgaaaacactgcatcccagggccttcgccccctcaaaaccctagcttggtgcggcgccagtgcctgcgcttggcgttgtacctgatggtgttgtcggtcctcatgcgaatccagtgtgggatcg

SEQ ID NO: 4685 - DNA, 442 bp, Lilium asiatic
  Clone ID: LIB3230-029-P1-K1-D3
cccacgcgtccgtgcatcacagttggcaacatatgacgagtccaagcaggctctgcttaggtggacacctcttgaagaaggtttttatctgcatctcatctcaagtggaatagctggaactgttgggacccttgtaactgcacctgtggacattattaaaacccgtcttatgttgcagaaggaatcgaaaggtgtcaaaagcagtagaaatggatttcgtgttgcataccaggtggtggttacggagggatttagagcactatacaaaggagggttttctatgtttgcaagattaggcccccaaaccgcaatcacatttctcgtctgcgagaagctgagagaactggctggaatgaatgccatatgattaatgtgcaaatttttggagcgatttgaaggtgatttttcctaaactgatcgataggaaatgagaggatgaacg

SEQ ID NO: 4686 - DNA, 435 bp, Lilium asiatic
  Clone ID: LIB3230-029-P1-K1-D5
gagatcacccgcaagttcatgaacaaaccggtcaggattctcgtgaagcgtgacgagctcaccttggagggcatcaagcaattccatgtcaacgtggagaaggaagagtggaagctcgacactctctgcgacctctacgagaccttggccatcacacaaagcgtcatctttgtcaacacccgtcgcaaggtcgattggctcaccgacaagatgaggagcaaggaccacaccgtctcagcaactcacggtgacatggatcagaacacgagggatatcattatgcgtgaattccgatctgggtcgtctcgcgttcttatcactaccgatcttcttgcccgtggtatcgacgtccagcaggtatctctggtgatcaactatgatctgccgacacagccggagaactacctccaccgtatcggacgaagtgggcgtttc

SEQ ID NO: 4687 - DNA, 377 bp, Lilium asiatic
  unsure (1)..(377): unsure at all n locations
  Clone ID: LIB3230-029-P1-K1-D6
cggacgcgtgggaaacagttcaggtgggtgctcagagatggagcgaccctcctgtcaacggtaaacattgcggactatattccaattgttgggaggctagggcttgacccacagggacttaaaggtaaaatgatgcaaaataagaaggatgctaggggattattgaaaataattgaagaaaggatgaatggggtgacaaaagagagggctcttattgatgctctggtggaatacatgaaaacagatggagtggagtttgggtttgatccgaaccatgtcaaggtacacattatggacnnnctagcaaccagtgtggagacaaccttaaccaacacatgatgggccttcgtggagctccttagacattcagagatcat

SEQ ID NO: 4688 - DNA, 330 bp, Lilium asiatic
  Clone ID: LIB3230-029-P1-K1-D7
tctcaggcaaaaaccaaagccaaggaaaggctgcttcagaaggaaattgctcaaaggatgagctaggtttcttgtttttgtctattatgtcttcttctgtagtcacctagagtgtttttttgatatctgtggtacttatgttaagcgaatatgtttcttctttttgtggattattctcattgaacatcaattggtactggatgtcagattttcatttgtgataatgattgttgctaaatttaagctatcatcttggttataattgcgcggaaacataaagtgcttattagagcaggtgcatgccttattggtttcgaaacagagacaatt

SEQ ID NO: 4689 - DNA, 313 bp, Lilium asiatic
  Clone ID: LIB3230-029-P1-K1-D9
tgctgagttgtaaatggcaagtggtgaaggacctgtgaccacaccctgccgggggtgcactaccagaataacacaagaagatccggtgagacccaaccgacttcaacaagaatgctgacctggggagtcaatacacctaggtttgaaggtcctgaaccgcgagctacgatgtcattagaaagaatgggctatgtcacatagaccgtagctcctttggtggaacagaaatgagtggatgctgatacacttgtacctgtgcgttcttaaatgagactgccgaggttttaaccaaagatggtgatgacacaattac

SEQ ID NO: 4690 - DNA, 384 bp, Lilium asiatic
  Clone ID: LIB3230-029-P1-K1-E1
cccctctctccctcggtctagagactgctggaggagtaatgacggtgttgatccccaggaacactaccatcccaaccaagaaggagcaggttttctcaacctactctgacaatcaacctggtgtgttgattcaggtgttcgagggtgaaaggacgaggaccagggacaacaatcttcttggcaagtttgagctttctggcattcctcctgccccgaggggtgttccacagataactgtttgctttgacattgatgccaatggtatcttgaatgtgtcagccgaggataaaaccaccggtcagaagaacaagattactatcaccaacgacaagggtaggctcagcaaggatgagattgagaagatggttcaggaagcagagaagt

SEQ ID NO: 4691 - DNA, 433 bp, Lilium asiatic
  Clone ID: LIB3230-029-P1-K1-E11
atttccaatcactacgaccgacactgtgtttcggaagaggtggtgcaaaataagaaactgaacaaattcaaccataccatcattgatcaacagtatcaattctaccagtcggacggattgaaaagatttgacccttcagaccccaacaaactacttccaagctatgttccagagggatcattcatcgtgagaacgcacacaccgatgtctaacttgttttcttgtctatggttcaatgaggtggaccgatttacccctcgtgaccaactgagctttgcatacacttacttgaagctccgaagaatgaatcctcataaaccttttcacctcaacatgttcaaggattgcgagaggcggtccatagcaaaacttttccgccacagagcagaagagaagcgaggaattaatgtagaagctgcttagatgataaatg

SEQ ID NO: 4692 - DNA, 324 bp, Lilium asiatic
  Clone ID: LIB3230-029-P1-K1-E12
cccacgcgtccgatgaaattgagcaaattgtctgcgggaatttcagtcatggattcaatgttctgaagcggttagatggctgtttgtatgcagtgaaacaaatcataaggcaattgcatcatgatgttttaaggaggcgtgctttgatggttggccaagctctggcatgcttgggttattctcataaaaacataattggataccatacatcatggtttgaaaaccaccagctctatatttatatggaactttgtgagctgttcctatccattgtcagattatacattcccgagtgtcgcacaaattcttgaatgttttgattag

SEQ ID NO: 4693 - DNA, 435 bp, Lilium asiatic
  Clone ID: LIB3230-029-P1-K1-E2
gagcttcttgttaagtcgataagtagtttatcagaggtgctattatcttcgtttagtagtggtaccaatgagttgaaggaacatgaccatgacctcctagaattggcactacacaatctggaattggtgaccggccagagtaaaaaggtggttgctagtggtaacataattccttccgaacgaaaggctgctggatcgcaggatatgaatttagaacctgatagtttgagcaagaccaataatgtcaccgaccatggcattaatgggaaagtgaattctagtagtaataatgtttctgtagatgacgttaaagaatcgagtaaaacttgcatggcccaggcttttgagaaggtctttgaggaaactttatccgagcaagaagaaaatcctcaggcactaatatataagaacctgtggattgaggcagaagctgca

SEQ ID NO: 4694 - DNA, 422 bp, Lilium asiatic
  Clone ID: LIB3230-029-P1-K1-E3
catttcatgcctattcctcaattatcagagattttgccagacttttctaaacctattgatgagctcgaaattctaccaattgatacatcatttttggaggatgctattagggaaacaaaatttatggaagaaatgtattgtgagttgaatttggaagatatttctacgaaaattgagaatgatctacctattgactttaataattattcattctttgaagatattgctgaaaagatgggctttaaggaaaatcttcaagtggtcttaaaacgagaagatgactcatttttggaagaaagtgatattgagaaggatgtgctcgatgattcaccaactcctgaaatgtgtcaactagaggataatcaacatgagttacccacccaaggtctggatattcatattggttcatacaatggacattt

SEQ ID NO: 4695 - DNA, 435 bp, Lilium asiatic
  Clone ID: LIB3230-029-P1-K1-E4
cggacgcgtggggaaaaccatccaagaacagagcaatctgtctgttctgtaagccgttctcctgaattgcgaaggcgatctgtagctcagagaggagttgaagacggcggtcataaggtttccgaaaacgattccgcaaagcttgttaaattagacacatcagcacaggctcacattgagaaacatagaaagcttcaagaagatttgacagatgaaatggttgtattggcacggcaactcaaggagagcagtcttatgatgaaccaatccttgcatgacactgagaagggttttgatcatccctattagagcaatgccatatgtgcctggtccattattgtctctagtgtcctctgaagcgcccggttgtattttaccgatcagtgcactactttactgattagtgctactgtccttgtggcaagacatcgaaaa

SEQ ID NO: 4696 - DNA, 440 bp, Lilium asiatic
  Clone ID: LIB3230-029-P1-K1-E6
accacctccattcgaagctaactagcgatgtcgggtcgaggaaagggtgggaaggggctgggcaagggaggcgccaagcgccaccgcaaggtcctccgggacaacatccagggaatcaccaagccagcgatccggcgtctcgcccgccgcggcggtgtgaagaggatcagtgggctcatctacgaggagacccgcggggtgctcaagatctttcttgagaatgtcatccgcgatgctgtcacctacaccgagcacgcccgccgcaagacggtgactgcgatggatgtggtgtatgccctcaagaggcaggggcgaactctgtacggcttcggcggctgatttctgcagacttttgtggtgctggtgtctatttccttttgttgttgacttggaattatggtatgtccccggtaaaattatcagatttctcatctgatatt

SEQ ID NO: 4697 - DNA, 323 bp, Lilium asiatic
  Clone ID: LIB3230-029-P1-K1-E7
ttcacgtctagacctagagtcggttataggggatcgggctgacatggtccggggcgccgctacggtacggaccgttgtgcatgtgcaccaacaaacctaatctgacaatctagcagttgcgtcgcttgaaccatctgtggttgaagcgcatatttcaagagacgccaatgttatcgccttggttgcacgggcgctcgtggtatacatatgtactgcgtattctagcattcggcaggatgaagccaaatcgcgtacaccgcattgttacacatctatcaggacactgctcagcgattctaagtatcatgtattgtactaccaag

SEQ ID NO: 4698 - DNA, 436 bp, Lilium asiatic
  unsure (1)..(436): unsure at all n locations
  Clone ID: LIB3230-029-P1-K1-E8
agtggagtgacatgctgccttcgcttccctggtcagctcaactccgatctccggaaactagctgttaacctcatcccgttcccccgcctccacttcttcatggtaggatttgctcccttaacctcgagaggctcccaacagtatcgctcactcaccgtacccgagctgacccagcaaatgtgggatgctaaaaacatgatgtgtgctgctgaccccagacatgggcgttaccttactgcctcagccatgtttcgtgggaagatgagcacaaaggaggtggatgagcagatgatgaatgtccagaacaagaactcatcctactttgtcgagtggatcccgaacaatgtgaagtctagcgtgtgcgacagcccaccgaccgggctagcgatggcagcaacgttcatcgggaactcaacttncattcaagagatgttta

SEQ ID NO: 4699 - DNA, 334 bp, Lilium asiatic
  Clone ID: LIB3230-029-P1-K1-E9
tcgcaaccccggccgatcgccaccagttgatcacggatgctgagcctcgcgctgctgagtaccggcgggtgcgccgtcgctctcgacgccgaaggtgcgtattactctcccgagaatcatcctttgagaggaatttgggcttatcgtgtggccaaagagtcagccacaccttgcgacttgcatcccttctccaacaatcttcatcgaaaaccctatccgatggaaggacaagaaggacctcagcagccccaccttgcttttgcccacaagttcttctttcttacccccttacccaccccgatcgttacgacatctttatggtccaacttcgtga

SEQ ID NO: 4700 - DNA, 343 bp, Lilium asiatic
  Clone ID: LIB3230-029-P1-K1-F1
ccgcaaccccggccgatcgccaccagttgatcacggatgctgagcctcgcgctgctgagtaccggcggctgcgccgccgctctcgacgccgaaggtgcgtaatactctcccgagaatcatcctctgagaggaattagggcttatcgggtggccaaagagtcagccacaccttgcgactcgcattccttctccaacaatcttcagcgaaaaccctcttcgatggaaggacaagaaggacctcagcaggcccaccttgctctcgcccacaagctcttctttcttacccccttacccaccccgacgtcgacgacatcgataaggtgcaactccgtgacgatgtcat

SEQ ID NO: 4701 - DNA, 241 bp, Lilium asiatic
  Clone ID: LIB3230-029-P1-K1-F10
ggagattggatttaaagattcagacttgttttaaaagcttcttgctttcttttgttttgtgagactcgcactttactactatacactgctgtctatccatatggattttgtgttgtgagactcgcactttattattatacactgctgtctatacatatggactatagactctttactatatgccgaatatgtgttattgaaaatcagatatgtgagaatgggagatttaaacccggagacc

SEQ ID NO: 4702 - DNA, 441 bp, Lilium asiatic
  Clone ID: LIB3230-029-P1-K1-F12
cccacgcgtccgatgaaattgagcaaattggctgcgggaatttcagtcatgtattcaaagttttgaagcggttagatggctgtttgtatgcagtgaaacaaagcataaggcaattgcatcatgatgttgaaaggaggcgtgctttgatggaggtccaagctctggcatgcttgggttattctcataaaaacataattggataccatacatcttggtttgaaaaccaccagctctatattcagatggaactttgtgagcggagcctatccatcgacagagattacatcccgaatgacgcacaagtgcttgaagttctgcatcagatggctaaagcattgcacttcatacacgagcgtggcatagcacacttggatgtcaagcctgacaatatttatgtgaagaataatacttacaaactgggtgattttggctgtgctactc

SEQ ID NO: 4703 - DNA, 434 bp, Lilium asiatic
  Clone ID: LIB3230-029-P1-K1-F2
gaggagtgatattcagaggaggcctggatttggttccgttatgtatacgtacaattcttctacaatgatcaagaagcagagcgaagtagttgaatggatccaaaggtacagactcatcatcgatgatattatttcaaataagaaggttgtggagggttcaggttatttcgataatttagaaagtgaactttattcagcgatacgtgctgcatattttggcccactgattgaatctatggatcttcttccggattgttttgaagctgaggaaaggtcgacttttgagacttcagaggtgttacatttggtttctgggcgtgatctctttggtattggttgcctggtggataatgttcgtgtcctgcccgacagccattgtgaaaaactaacttcaagttctgtggcctctgggatttgtcaatatgctgggcaga

SEQ ID NO: 4704 - DNA, 146 bp, Lilium asiatic
  Clone ID: LIB3230-029-P1-K1-F3
gaggagtgatattcataggaggcctgtttttaacggcgttttgtatacgtactgttggggtacaatgatcaagaagctgatcgatattttttaatggatccaaaggtacagtcttatcatccgttgtattattttaaataagaagg

SEQ ID NO: 4705 - DNA, 442 bp, Lilium asiatic
  Clone ID: LIB3230-029-P1-K1-F5
ctttgagacggagtcaggagatagaatgcagtgtatgcttggaccgtgtgctttctaaacccctacctgctgaacggaaatttggattgctctcagaatgtgaccatgccttctgtatttcatgtattcgagattggcgtaacaactctccatcctccggcttggatctaaacagtgcattgagggcctgcccaatatgcagaaagctctcttactttgtcattccaagcattatatggtattcaacaaaggaggagaaacaagaaataattgataactacaaagccaagctcaagtctatagattgcaaatactttgacttcggaaatggaacttgtccttttggaactagttgcttttacaagcatgcatacagagatggccggatagaataagtggtccttcgacattttgatgctgaagatggaagtacagtgatagc

SEQ ID NO: 4706 - DNA, 336 bp, Lilium asiatic
  Clone ID: LIB3230-029-P1-K1-F7
tcggagccacatccaaacgacaccagtttttcacggatgcttagcctcgcgctggtgagtaccggtggttgagaagcagatctaaacactttaatggatccaaacgctcagacgaatcatcctttgtgtgaaatcaaataagatgggtggggcaaattcacggtatttcgttaatacagaaagtgaactttattcagcgatacgtgcaaaatatttcggacgaatggtcaagtatgacgtaattcttccgaattgttttgaagcagatgaaaggacgacttttgagacttcagagggggtacatttggattctgggcgagacatcttcggtactgt

SEQ ID NO: 4707 - DNA, 244 bp, Lilium asiatic
  Clone ID: LIB3230-029-P1-K1-G10
ggtcgatcacatcaagggtgttggccggttgctttgatgccgtcacccagaaaaagtgcggcgacaagaagctccagttgagaagactgcttctcaccatgctttatggttgggcctatgcggagccattggggcacttactgcacaagcacatggagacgctttacaaaggcaaatcaggaaacaaaactaaagctataaaggacgtatgggaacaggatacatcatcaccatggaacaacat

SEQ ID NO: 4708 - DNA, 442 bp, Lilium asiatic
  Clone ID: LIB3230-029-P1-K1-G11
ggaaaaattgggaagaggtcttcaaagaaatatttgctgatcatgtggagttttgtggccaacaatagggagttcttaagtcttcgaaacttcttgtttatgtaactggaaccaaagtttgggactgtaaaaggatgatcttacgtgtaattagactgcaattacgataatacaactaattttacaaaggcttggaaattctcaaactatataccatgggactacttttgacctttctacattgattccaatgaaagacaatcaagttggccacctcttgactgaaattgctaaatctattgtttgatattgtacttggaatgtctagaacgcccaaaacatgagtgtatggaatgcaacatggagaggccctcagtggaagctagtaagcctacagctgtgttaggagtttatatgtgcttagcaccaactctgatgggag

SEQ ID NO: 4709 - DNA, 332 bp, Lilium asiatic
  Clone ID: LIB3230-029-P1-K1-G12
tctgggaaaaattggtaagaggtcttcattgtaatatttgctgatcatgagaagttttgagaccatcaatagggagtttttaatccttctttacttcttattttttgtaactgtttctaatactttttttctgcaaatggatgatattacgtgtaattagacttgtaacactattgtacaactatttttacaaattcttggaaatttttaaactatttaccatgagactacttttgacctttgtacattgatttctaacgattgacaatctaattttcctccctttgtctgaaatttcttatatacatttttagatatttttcttggaaatg

SEQ ID NO: 4710 - DNA, 382 bp, Lilium asiatic
  Clone ID: LIB3230-029-P1-K1-G2
cttggaggtgcatgttgaaaagggtatgcagaatggccagaagataaccttccctggagaggctgatgaagcgcctgattgcgtcactggcgatattgtgtttgtcctccaacaaaaagatcaccctaagttcaagagaaagggtgatgatttgtttgttgaacacacactctcccttactgaagccctctgtggttttaggtttgtgttgacccatttagataatcggcagctgctaattaaatccgagcccggtgaagttgtcaagcctgatcaattcaaggcaataaatgatgagggtatgccaatgtatcaaaggcccttcatgagggggaagctttacatccacttcacagttgactttcctgactcactgacgcct

SEQ ID NO: 4711 - DNA, 432 bp, Lilium asiatic
  Clone ID: LIB3230-029-P1-K1-G3
gtatttcttgccatttgctagaaacggtatcaatgaccaaatcgaattagccatcttaagagcagataagatgggtgttaaggtcctcagtctggcggcgctcaataagaatgaagcactgaatggcggtggtaccctgtttgttaacaaacaccctgatctaagagttcgagtcgtgcacggtaacacgttaactgctgcggtgatcctcaatgagatacctgaggatgtcaaggaggtttttctcaccggagctacatccaagcttggaagggcaattgccctatacctttgtcgcaagaacattagagtaatgatgctcactcaatcaactgaaagatttctaaggatacagaaggaagcatcaccggaatgccaacataatcttgttcaggtgaccaagtaccaagctgcacaaaattgcaagacatg

SEQ ID NO: 4712 - DNA, 444 bp, Lilium asiatic
  unsure (1)..(444): unsure at all n locations
  Clone ID: LIB3230-029-P1-K1-G4
gccgtccacttaaggggggtggcccggtgccacgattccgccgcccacaaaatatccggggtgaaaaagcttcagttgagaagactgcttctcatcatgctttatgggtttgcctatgcggggccatttgggcacttcctgcacaagttcatggatatgcttttcaaaggcaaatcaggaaacaaaactgtggctaaaaaggtcttattggaacaggttacatcttcaccatggaacaacatgttctttatgatgtattatgggttgatagttgaagggaggtcgtggaatttatttagtacaaaggtcagaaaagatctgccatctgttcaattgactgcatggaagttttggcccatagttggctgggttaactatcaatatatgcctctgcaacttcggggtctcttcaacagctnttttggtgcatgctgggcaatattt

SEQ ID NO: 4713 - DNA, 432 bp, Lilium asiatic
  Clone ID: LIB3230-029-P1-K1-G6
cggacgcgtgggcggacgcgtgggcgccgccgccgccgccgccgctgccgcccgccggagaaatggccgttccgcttcttaccaagaagatcatcaagaagcgcgtcaagaagttcaagaggactcagagtgatcgaaagatatgtgtcaagcaaagctggcgtaggccgaagggtattgactcccgtgtgaggaggaagttcaagggagtaactttgatgcccaacattggctacggctcggacaagaagacccgccattacctgcccaatggtttcaagaagtttgtagttcacaatgttgccgagctggaattgcttatgatgcataacaggacatactgtgctgagatagcccacaacatctctacaaagaagcgtaaggttattgtcgagcgtgctgcacaactggacattgcggtcaccaacaagc

SEQ ID NO: 4714 - DNA, 436 bp, Lilium asiatic
  Clone ID: LIB3230-029-P1-K1-G8
gttaagagtaaagtaaaaaagcctaagaaggaagaaaaggtgaaaaaggatcccaacaaaccaaaaaggcctgctagtgctttctttgttttccttgaggagttcaggaagacatacaagcaagaacatccaaatgtgaaagctgtctcagctgttggtaaagctggcggagaaaagtggaaatcgttgtccaaagctgagaaagctccatatgaagccaaggctgcaaaaaggaaggttgaatatgaaaagcaaatgtcagcttacaacaagaaacaggaaagcggggctgaggctgaggctgatgaggaagaggaagagggatctgagcaaagtggagaggaggagggggaagaagaggaagatgaagaagacgaagaagatgatgagtgagagcgtcgatcgcctttcacttaaagttgtagttgatccatgg

SEQ ID NO: 4715 - DNA, 302 bp, Lilium asiatic
  Clone ID: LIB3230-029-P1-K1-G9
gtcagtaactgggatgacatggagaagatttggcatcacaccttctacaatgagcttcgtgttgcaccagaagaacatccagttcttctcacagaagccccactcaaccccaaggccaacagggagaagatgacgcaaatcatgttcgagaccttcaatgtccctgccatgtatgtcgccattcaggctgtcctctccctgtatgccagtggtcgtacaacaggtatcgtgctggattctggtgatggtgtcagccacacagtgccaatctatgagggttatgctcttccggatgccattct

SEQ ID NO: 4716 - DNA, 411 bp, Lilium asiatic
  Clone ID: LIB3230-029-P1-K1-H1
cggacgcgtggggttgatccaggtttatgagggtgagagaaccaggacccgtgacaacaatctcctcggtaaatttgagctttccggcatccctcctgctcctagaggtgtccctcagattactgtctgctttgatatcgatgccaatggtatcttgaatgtgtctgctgaggataaaactactgggcagaagaacaagatcaccatcaccaatgacaagggcaggctcagcaaggaggagatagagaagatggttcaagaggcggagaagtacaagtctgaagatgaagagcataagaagaaagttgaggcgaagaatgctcttgagaactactcctacaacatgaggaacaccatttaggatgacatgattgcgtccaagctaccggctgatgacaagaagaagattga

SEQ ID NO: 4717 - DNA, 268 bp, Lilium asiatic
  Clone ID: LIB3230-029-P1-K1-H11
cccgccttcggtcgccccacctacgacggcgtcatctccggtcgcgtctccggtcgcaagtggaagcaggtccgcacgcagcgcgcctcctccgccaaggtctcccgccgtggtccgtccttcgagcagcgaacgaaggataaggtgctgaaacgcgcgttcagggagcggtaggaggtgctcaaggtggagtatccggcagacgaaggcggttattaggaagaagcgagaggtgcgtgtgaagaagtagatggagattgtgctgcgg

SEQ ID NO: 4718 - DNA, 319 bp, Lilium asiatic
  Clone ID: LIB3230-029-P1-K1-H2
cgattcctctcgaagggcctcttagttcccgtctctcccaaccatggcgaccactcagaaggccatgagcaagaagcgcaagttcgttgccgatggcgtattctttgccgaattgaatgaagtcctcaccagggagctcgccgaggatggttactccggcgtggaggtgcgcgtcacgccgatgcgtaccgagatcatcatcagggccaccaggactcagaacgtcctcggtgagagggggcggcggattcgggagctgacctcggtcatccagaagaggttcaaatttcccgagaacgcagttgagctgtatgctgag

SEQ ID NO: 4719 - DNA, 369 bp, Lilium asiatic
  Clone ID: LIB3230-029-P1-K1-H6
tcacagggagcatacactaatctccatattatgggaggctgatacattattcactatacaaaccaactgttttaccgtctactaaatacaaaccacttttaagttgcaaaaaaattaactcacgaataccacataaatataggcatcttatgacagattctatgaaaccccgcctaacgctcgatcacatacgggttggagagaaatacatatgtcaccgtagcgaatcacaagaagacaccaactctatcactttaagctttcgttgcagtcatcgctgatactctggcagtatctgagtcgtctagggcgctttttgttataagttgcggttagcagatcgcgctccatgtcaaacggaatgggctc

SEQ ID NO: 4720 - DNA, 431 bp, Lilium asiatic
  unsure (1)..(431): unsure at all n locations
  Clone ID: LIB3230-029-P1-K1-H7
cggacgcgtgggaaaatggacgacacattcgatccggatttgattcacgccatcttcaagctcgtctagagcagaagatcagagaggatcgagacgaacgatgatatcgaagtcatcgacctcgaggcaggggttgggacatctaagaagagtcggccaactacagctaatttaaatggtctgaaggttagttgtgaacttcttcgactctttgtgacagaggctgtgcagcgtgcttctgtaattgccgacgcagagggccttaataaaatcgaagctacccatttagaacggatacttcctcaacttcttctggatttttaagattgtcatcaaaagtattcttcaagacaatgcctggaaggggtatatacatgcaacctagatagccagttagcaggtacggggactntgaatgctaaaatatagaa

SEQ ID NO: 4721 - DNA, 405 bp, Lilium asiatic
  Clone ID: LIB3230-029-P1-K1-H8
cggacgcgtgggcggacgcgtggggagccaatgccccccaagacagtgaagcaccaaggcatgagctggacggtctgggaccgctggacggtagagggcgaccttacattgagagagctcttgcagtggattaaggacaaaggccttgacgcatatagcatatcatgtggcagttctttgctttacaacaatatgtttcccaagcacaaggagcggatggacagaaaagttgtggacttggcgagagaggtggcaaaggtggaggtgcccccgaaaaggcgccatctcgatgtggtggtggcttgtgaggatgaagagggggaggacatcgatgttccccttgtgtctatatactttcggtagttggtcttagcgatcgatcgcacactcatttagcatttttct

SEQ ID NO: 4722 - DNA, 67 bp, Lilium asiatic
  Clone ID: LIB3230-030-P1-K1-A10
tccaagcttgcgtacgcgtgcatgcaacgtcatagcttttttacagtgtcacctaaatgcaccttag

SEQ ID NO: 4723 - DNA, 420 bp, Lilium asiatic
  Clone ID: LIB3230-030-P1-K1-A11
cggacgcgtgggcgcccccactcctctccaaccgctcgttctctagggtttcccggcggcggagcgacgatgagcgccgaaaacaagcaggacgccctcgacctctccgatctcaatgccagcctccccggcgccgccgccggactcagcggtgaggacagggctaagctcgtcgacgtcatcaaggagaaactgaagcagtctgctgtgttggaggatctatcgccgaacgttcggaagcgagtcgaggttctgagggagattcagagccaacatgatgagtttgaggcaaaattcttcgaggaaagagcagcacttgaagccaaataccagaagttttatgaacctttatacaccaagcgatgtgaaattgtgaatggtgtggttgaagtggaaggtgtaacaattgaagcaactgat

SEQ ID NO: 4724 - DNA, 362 bp, Lilium asiatic
  Clone ID: LIB3230-030-P1-K1-A12
tcgctgacgcgtgggctcccccactcctttccaaccgctcgttctctagggttttccggcggcggagcgacgatgagcgcctaaaacaagcaggacgccctctacctcttcgatctcaatgccagccttcccggcgccgccgccggactcagcggtgaggacagggctaagctcgtcgacgtcatcaaggtgaaactgaagcagtctgctgtgttggaggatctatcgccgaacgttcggtagcgagtccaggttctgagggagattcatagccaacatgttgagttttgggcaaaattcttcgaggaaagagcagttcttgaagccaaattaccattagttttatgaacctttatacacca

SEQ ID NO: 4725 - DNA, 429 bp, Lilium asiatic
  Clone ID: LIB3230-030-P1-K1-A3
ctcgccttcctcgctatttggctgtccccccacctgatacaatgcaacaagctaagaagatcgatgaggaaattctccaagaggtagtaaagatgggttttgacaagaaccaattaattgaatctcttcacaacagaattcaaaatgaggcaactgttgcatattatttgcttctggacaatcggttccgtcctactagtggttatcttggagccgagttcaaagaatccatggaatatggcttcttccgtacgcacgatattgcagctccagtcctgacacatcgtctaccaggatatatcgatcatcagacagttggttcgaggcaatattttgctgttgaaagaaaatgggctcttggacttcagtctcgagctcatccccgtgaaataatgacggaggtccttaaagctctgcaagaattgaatg

SEQ ID NO: 4726 - DNA, 368 bp, Lilium asiatic
  Clone ID: LIB3230-030-P1-K1-A4
gggagggggccgagagagtggagaggtgtgaggtgtttgggaagtggagggcgaggatggggatggccggtctccgaccggtggagctggggccggcggtgtgtgagccggttcgggcccggttgtgttcgctgaggggtaatcccgggttttcggtgagggaggaggggggtggactatgctttggatggatagtacgggtgcttaccgtccctttcgcatggatgcaggcgccttaacctatgctgttcgcacgatatattagtttcagtattgacgcacagtctgaccagatatattgagcatgatacagaatgtggggggcattatttttgtgttggaagaaaatgggcttttttactttagtc

SEQ ID NO: 4727 - DNA, 428 bp, Lilium asiatic
  Clone ID: LIB3230-030-P1-K1-A5
cggacgcgtgggtgcgcttgttagagaagatgctggcattcgaacccaaggatcggccaactgctgaagaggctttggcggatccttacttcagaagcatagcgagggttgagagagagccatcagcacagccagttacgaaaatggagtttgaatttgagcggagaaggataacgaaggaagatgtaagggaactcatttacagagaaactcttgagtataatccgaagatgttgaaagagttcttggagggaacagagacgaccggtttcatgtatccaagtgctgttgatcatttcaagaagcagtttgcttttctagaagaacaatatggaaatggtgcacaagccccaccacctgagaggcagcatgcatctttaccccgagcctgtgtatttcatccagggaacacaccacaaaattcagct

SEQ ID NO: 4728 - DNA, 358 bp, Lilium asiatic
  Clone ID: LIB3230-030-P1-K1-A6
ctgacgcgtgggtgcgcttgttagagaagatgctggcattcgaacccaaggatcggccaactgctgaagaggcttttgcggatccttactttagaagcatagcgagggttgagtgagagccatcagcacagccagttacgaaaatggagtttgaatttgagcggagaaggattacgaaagaagatgttagggaactcatttacagagaaactcttgagtatcattcgaagatgttgaaagagttcttggagggaacagagacgaccggtttcatgtattcaagtgctgttgatcattttaagaaggcatttgcttttctagaagaacaatatggtaatggtgcacatgccccatcacc

SEQ ID NO: 4729 - DNA, 416 bp, Lilium asiatic
  Clone ID: LIB3230-030-P1-K1-A7
aaacaagtcaatgagttctcagattgacatcacgttttcacaatgtccccaacttgagcctttgcctcacttagtctttgccctactccgtaatgctctcctccggtttcatgaaaaaggtgttcatcctgattacagaatctacttgcaatgccttttcagtgtgttggaaccgagttctattcattgcggtatatacccatcgctagtgtcgcattcaacaccggataaacaggcgtatccccgtcattcattgagccgtgcagcactgataacaagtggtagtccgatatttgtcttagatgcatataccactttgatagtcttctacacatcaacagctgacccctcacttgctttcccttcaccacatgactgcttattgaggaagaacactaatatggtgaagcaaggaa

SEQ ID NO: 4730 - DNA, 420 bp, Lilium asiatic
  Clone ID: LIB3230-030-P1-K1-B10
ccaacttcagtaatgtcgccatagacgaagatcagattgccgcaaaccttgtcaagcatggcccacttgcaattggcatcaatgctgtcttcatgcagacatacattgggggtgtatcatgcccatacatttgcggtaggcatttggatcatggagtgcttctggtgggctatggctcagctggatacgcaccgatccgtctcaaggaaaagccatactggatcatcaagaactcttggggtgaaacctggggtgagaagggctactacaagatctgcaggggtcgcaatgtttgtggggttgactccatggtctccactgtggctgccgtccatagctcacactagattgactagatttactgttccagtgcctgttaccatgttactgtaggcctggtgcattaattattgccgcttt

SEQ ID NO: 4731 - DNA, 278 bp, Lilium asiatic
  Clone ID: LIB3230-030-P1-K1-B11
acgccaactttagtaatgtaggcatatacgaagatcagatagacgcaaaccttgccaagcatggtccaattgcaattgacatcaatgctgtcttcatgcagacatacatcgggggcgtattatgccaatacatttgcagaaggcatttggatcatggagtgcttctgacgagctatagctgacctggatacggactgataaagtttaaagaaaagccatactggatcatgaataactgtgttttgaaacctcagatgagtttaactaatacaagatct

SEQ ID NO: 4732 - DNA, 419 bp, Lilium asiatic
  Clone ID: LIB3230-030-P1-K1-B12
ctccatcgtctccggcgccggatccccacgcaggtgtctttctaattggattgctgggactcgagataaggtcaaccggctggtcatagaatggccaaccttgctgattcttttttggctgaccttgatgacttgtctgataatgaagcacaacttgatgatgatattgcagaaggtggagacatggaattagatgttgatggtgatttagctgacattgaatctcttaactatgatgaccttgatagtgtttcaaaactgcagaagacacaacgctacactgatattatgcagaaagttgaagatgctctccacaaaggttcagataattcaggtcatgtaacaggattagaggatgaccctgagtatcagttaattgttgactgcaatgcattatcggttgacattgagaatgaaat

SEQ ID NO: 4733 - DNA, 426 bp, Lilium asiatic
  Clone ID: LIB3230-030-P1-K1-B3
gaaacgggaccctgagggtttgtttttattaatttctatctcctcatttttcttttattttggtaatttttttagttagtttttatttattttcatttttatagcgtttgtttgtttggtcaattaaattattgagcccatgatgacataaatattggaattaccggctgagggttttaggcccatttctgacgataaactactggctgtatggctgaggctttctgtatgtgtaaatttattggttccatatgatctttataaatcagtttttgttatgaatatatgattgttagttatttttttaattatatttgggccttttgattttaagtttatttgctgtttgataatttacttaatatcgtttacttttttgttgtccaatacacagactgttgaattaaatgttgcctcagcgttgca

SEQ ID NO: 4734 - DNA, 273 bp, Lilium asiatic
  Clone ID: LIB3230-030-P1-K1-B4
gaaacgggaccctgagggtttgtttttattaatttctatctactcattcttcttttattttggtaatttttggagtgagttcttatttattttcaattgttatagcgttagattgtgtgggcaattaaattattgagccccacatgacataaaaattggaattaccggctgagggttttaggcccatttttgacgataaactactggctgtatggctgaggctttgtgtatgtggaaatggattggttccagatgatctttataaaagagttt

SEQ ID NO: 4735 - DNA, 425 bp, Lilium asiatic
  Clone ID: LIB3230-030-P1-K1-B5
cccacgcgtccgtaagctggaaggatgtcaagtggcttcagacaattactaccatgccgattctggttaaaggagtgataacagcagaagatacaaggttggccatccaagctggggcagctggtataattgtgtcgaaccatggagctcgtcaattggattatgttccagcaactatcactgcacttgaagaggttgttaaagctgcacagggccgagttcccgtgtttgtggatggtggtattcgtcgtggcacagatgttttcaaggcattagctctgggtgcatctggcatatttatcggaaggccagtcgtcttctctctggctgcagaaggagaagctggtgtccgaaaagtcctccagatgctccgcgaggagtttgagctcacaatggccttaagtggctgcagatccatcaaagag

SEQ ID NO: 4736 - DNA, 401 bp, Lilium asiatic
  Clone ID: LIB3230-030-P1-K1-B6
cccacgcgtccgtaagctggaaggatgtcaagtggcttcagacaattactaccatgccgattctggttaaaggagtgataacagcagaagatacaaggttggccatccaagctggggcagctggtataattgtgtcgaaccatggagctcgtcaattggattatgttccagcaactatcactgcacttgaagaggttgttaaagctgcacagggccgagttcccgtgtttgtggatggtggtattcgtcgtggcacagatgttttcaaggcattagctctgggtgcatctggcatatttatcggaaggccagtcgtcttctctctggctgcagaaggagaagctggtgtccgaaaagttcttcagatgctccgcgaggagtttgagctcacaatggcccta

SEQ ID NO: 4737 - DNA, 401 bp, Lilium asiatic
  Clone ID: LIB3230-030-P1-K1-B7
ctgacgcgtaggatcgtgttttgctgacagaatagaagagtttacgcaaaaaacaatgggaccacaggcgcttgtgtcttcttcacttacctgctctgttcactaccgctcgacatatattcggcgcaaaaccagctgtgtacgtatcacaaatgaaggcttccttggttgttgaggctgcatcatctccacctgccaagctaggagcaaacaggcaattgaggtttgcatcatcacagagtatatattacttggatggcaaatctcctggcgactcaagatcctatccaattggtctctcagacccatatggaactggaggcttcattgagcctagatggctagcctacggtgagatcatgaacgggaggattgctatgctctgtgcacgtggagctatt

SEQ ID NO: 4738 - DNA, 431 bp, Lilium asiatic
  Clone ID: LIB3230-030-P1-K1-B8
gtgccgatagactttttagcaaatgagatcctaaagaatgatttagcgtcacctactacgctagtgccaccagatacggagtcttcgtcagaggtgctgcaggagcttgctgagcgatataataaaatgaaaggaggatatggaacagctgatgcaacagtctcactccaaaaactagcaattcaactggggtatgaaagcttagactctgtgacccctgaagacatggttatgcaggccttgaaggaaattgagaagttgactagagtgaagaagatgatggaagaagctgccaggccattttgatagagaacttatctccaccggattttcgaccatcttcattcgagttggagcggaatcatcaaattgaggtccgactgctgacactttccattcctgatttgtgattagtttttttcttcttctga

SEQ ID NO: 4739 - DNA, 410 bp, Lilium asiatic
  Clone ID: LIB3230-030-P1-K1-B9
ccaacttcagtaatgtcgccatagacgaagatcagattgccgcaaaccttgtcaagcatggcccacttgcaattggcatcaatgctgtcttcatgcagacatacattgggggtgtatcatgcccatacatttgcggtaggcatttggatcatggagtgcttctggtgggctatggctcagctggatacgcaccgatccgtctcaaggaaaagccatactggatcatcaagaactcttggggtgaaacctggggtgagaagggctactacaagatctgcaggggtcgcaatgtttgtggggttgactccatggtctccactgtggctgccgtccatagctcacactagattgactagatttactgttccagtgcctgttaccatgttactgtaggcctggtgcattaatta

SEQ ID NO: 4740 - DNA, 172 bp, Lilium asiatic
  Clone ID: LIB3230-030-P1-K1-C1
atgaaaggctggtttacgagggttgaattctatatgatacgggtcactgtgaggaagggctgcgcagggccgaggagtcaatctcaattcaaagatcgtttgaggctttctttttgaaagcttatgctctgccaaattcgagtccgaatccttcatgctccacaacagttgt

SEQ ID NO: 4741 - DNA, 390 bp, Lilium asiatic
  Clone ID: LIB3230-030-P1-K1-C10
agcagaggttcagggaattcgcctccaaaaccctagaagaccctgcgaaggttgaccccgacaacctcgactgggagagcaccttctatctccgtcacctccccacctacaacatggaggaggtccccgatctcaccgatgagtaccgggagacgatgagggagttcgtcaagaggctgggagagctagcggaccagcttatcgacctgctgtgtgagaacctggggttggagaaagggtattagaagaaggcctttagtgggacgaaggggctgaccttcggtaccaaggttagcaactattcgtcctcaccgaaaccggtactgatcaagggcctttgtgcacacaccgatgctggcggtctcatccttgtgtttcatgactacaagg

SEQ ID NO: 4742 - DNA, 98 bp, Lilium asiatic
  Clone ID: LIB3230-030-P1-K1-C11
acgagcagaggtccagggaattcgtctccaaaaccctagaagaccctgcgaagggtgacccccacaacctcgactgtcatagcaccttgtatctacct

SEQ ID NO: 4743 - DNA, 417 bp, Lilium asiatic
  Clone ID: LIB3230-030-P1-K1-C2
atgaaaggctggtttacgagggttggattctatatgatacgggtcactgtgaggaagggctgcgcaaggccgaggagtcgatctccattcaaagatcgtttgaggctttctttttgaaagcttatgctctggcagattcgagtccggatccttcatgctccacaacagttgttttcacttcttgaagaagcacttaaatgcccatcagataggcttcgaaagggtcaggccttgaataaccttggcagtgtgtatgtcgactgtgggaagttagatctggcagctgattgctacataagtgcccttaagatccgccacactagggcccatcagggccttgcccgcgtccatttcctgaagaatgataggaatgctgcatatgatgaaatgaccaagttgatagagaaggcgagaaac

SEQ ID NO: 4744 - DNA, 233 bp, Lilium asiatic
  Clone ID: LIB3230-030-P1-K1-C3
gagatccttgcctcacaaacttagcagcgaagaagcagcaagaaccaaagacaaagaagcactccacactccatgctgtattcacagtgggcagcgacacgactgtcggagtacaggccgtgtctccagaagatccggtggtttcgctctccccccgcgagggtctttccagcggcggcccccgccggcaagtctgagtggtgggcggtggaccgggagatacacacgatatg

SEQ ID NO: 4745 - DNA, 412 bp, Lilium asiatic
  Clone ID: LIB3230-030-P1-K1-C4
gagatccttgcctcacaaacttagcagcgaagaagcagcaagaaccaatgacaaagaagcactccacactccatgctgtattcacggtgggcagggacgcgactgccggagtacgggccgtctctccagcagctacggtggttccgctctccccccgcgagggtattaccagctgcggtccccgccggcaagtcggaatggtgggcggtggacggtgagatgcactagatcggcgaccacgttccccaccgggagcgtttcgtcatcccccgcgacaacctccccaaccgcctacgtaagcagatgcgcgagcagttcatgcgccgcacacgtattgtttctcaaggactcgtagcatgaaccttggtgcaaaaggcatatggagctatataatgaacttagggagaactgg

SEQ ID NO: 4746 - DNA, 428 bp, Lilium asiatic
  Clone ID: LIB3230-030-P1-K1-C5
agataatttctatcctccacctgattatcctgttgaaaagccacctcaccatggtatatccacatacggacgagatgcacctccgatgggggctcatccctattccaatcaacagccacctatgtcctctcaggtctcgatacatcatatgcaaatcccactgtcttatgctgatgctgtgatcgggtcagctggttccaatattagctatatccgccgcaccagtggtgcagctatatctattcaggaaagcaggggtgttcctggagagatgactgttgagatcaatgggactggtacacaaatccaaactgcacagcagctgatacagaatttcatggctggagctgctgcagctgctgctcctccggcacaaggcccagggccaaacacaatgacccctgatcagggttatggttcctatgcac

SEQ ID NO: 4747 - DNA, 397 bp, Lilium asiatic
  Clone ID: LIB3230-030-P1-K1-C6
aggtaatttgtatcctacacctgattatcctgttgaaaagccacctcaccacggtgtatccacatacggtcgagatgcacctacgatgggggctcatccctattccaatcaacagccacctatgtcctctcaggtctcgatacatcatatgcaaatcccactgtcttatgctgatgctgtgatcgggtcagctggtttcaatattagctatatccgacgcaccagtggtgcagctatatttattcaggaaagcaggggtgttcctggagagatgactgttgagatcaatgggactggtgcacaaattcaaacttgcacagcagctgatacagaatttcatggctggagctgctgcagctgctgcttctcccgcacaagggccatggccaaacacaat

SEQ ID NO: 4748 - DNA, 413 bp, Lilium asiatic
  Clone ID: LIB3230-030-P1-K1-C7
cccacgcgtgcgctctctcaattgctttcctgttcttcgccaagcaagctcgaattttccgatcactcgatcggaaaatccagtcgattgcatctctttctgcgtctggattgtgttccgatgacgtgtgcggaagacgaaaaggcggttctttagctgccgacgtgacttcatggcgatgacgtcgagaaaggggcttatgtgaaacttatcgagggtcacgaatcatcatcatcatcatcagggctggaagagaatgaagaagaagatgtataggaggctgctacgtggccgttttggttctgggtcaagcttgctcttttattctatttccttgcgtcctcggcctttggtgcttaccgatggctcggtcctttcatcatggacaaggagcttatcccaattgtgaaatg

SEQ ID NO: 4749 - DNA, 312 bp, Lilium asiatic
  Clone ID: LIB3230-030-P1-K1-C8
cccacgcgtgcggtctctcaattgcattcctgttctccgccaagcaagctcgaatgttccgatcactcgttcggaaaatccagtcgattgcatctctttctgtgtctggattgagttccgatgacgagtccggaagacgaataggcggctcttttgctgtcgacgagacttcaaggcgctgacatgtagaaaggggattatgtgaaacttaaggtgggtcaccaatgattatcatcatcatcacggctgggagagtatgaagaagaagaagtaaatgttgctgattcgtgcgacgttttggtttctgggtca

SEQ ID NO: 4750 - DNA, 428 bp, Lilium asiatic
  Clone ID: LIB3230-030-P1-K1-C9
agcagaggttcagggaattcgcctccaaaaccctagaagaccctgcgaaggttgaccccgacaacctcgactgggagagcaccttctatctccgtcacctccccacctccaacatggaggaggtccccgatctcaccgatgagtaccgggagacgatgagggagttcgtcaagaggctgggagagctagcggaccagcttctcgacctgctgtgtgagaacctggggttggagaaagggtatttgaagaaggcctttagtgggacgaaggggctgaccttcggtaccaaggttagcaactatccgccctcaccgaagccggatctgatcaagggccttcgtgcacacaccgatgctggcggcctcatccttctgtttcaggacgacaaggtgagcggcctccagctgctcaaggacggtgagtgggtg

SEQ ID NO: 4751 - DNA, 428 bp, Lilium asiatic
  Clone ID: LIB3230-030-P1-K1-D5
ggtcccggcctccaaggagggggcctctgacaagaagaagaagaggtcgaagaagtcggtggagacctacaagatctacatcttcaaggtgttgaagcaggtgcaccctgacatcgggatctccaacaaggcaatggggatcatgaacagcttcatcaatgatctctttgagaagatggctcacgagtccgcccgccttgctcgctacaacaagaagaacaccatcacctctcgggagattcagacttccgtccgcctcgtcctccccggcgagctcgccaagcacgccgtttctgagggcaccaaggcggtcaccaagttcaccagcgcttagggtctctactgtctacctctttgtgttcagacttgttattgtattggtcggatgttttcgtgaatgtggaaccaaaagccttttggtttgctct

SEQ ID NO: 4752 - DNA, 421 bp, Lilium asiatic
  unsure (1)..(421): unsure at all n locations
  Clone ID: LIB3230-030-P1-K1-D6
aagtggcaaacctcttcactacaaggggagcacattccatagaatcattcccagctttatgctccagggtggcgatttcactcttggtgacggaaggggaggagagtcgatatacggtaccaaatttgaggacgagaacttcaagctcaagcacacagggccaggatttctctcgatggcaaacgctggtcgagataccaatggttcacagtttttcatcaccacagtaaccactagctggctggacggcaaacacgtggtatttggaaaggtgatatctggaatggatgtagtttataaggttgaagccgaggggcgacagatcggaacacctaaaagcaaggtcatcattgccgatagcggngagctgcctctgtgattgtaaccattcctagcttgcttttggatccgatccgagcta

SEQ ID NO: 4753 - DNA, 425 bp, Lilium asiatic
  Clone ID: LIB3230-030-P1-K1-D7
ggtggacctgcttgtgagggaaatgatgagtgccactgatgtggatgatgcgagggtccgtgcttcccgagtgctggaggtcctggagaagtccattgtacgtgccagtaccgagacaaatgaggaaactatgatgctgaaggagcaagtccaagttttgcttcgagagaacagcatcctaaagcgagcagtggcgatccagcatgaggttcagcaggaatacactgtgagagaccaagagctgcagcatctaaaacaactggtgccacagtatcaggagcaactgaaaaccctagagatgaataattacgccctgacgatgcatctcaaacaagctcaacagagcagctccattccagggcatttccatcctgacatcttttgagatgtccggcttactaccctgctaatggtttgcagctatg

SEQ ID NO: 4754 - DNA, 146 bp, Lilium asiatic
  Clone ID: LIB3230-030-P1-K1-D8
gttggacctgcttgtgagggaattgatgagtgccagtcgttgtggatgatgcgacgggtgcgtgctcacggagcgctggtggtactgtagaagtacattgtgcttgccatgtccgagacacatgaggaaactctgatgctgaagga

SEQ ID NO: 4755 - DNA, 142 bp, Lilium asiatic
  Clone ID: LIB3230-030-P1-K1-D9
ctcagacctgttagtaagggaaacaaagagtgccactgttgtaaacaatgagagggttcatgctcacccagtactggaggtactggagaactacatagtgcttagaaatgactaatacaaatgaggaaaccaaaagtgctta

SEQ ID NO: 4756 - DNA, 425 bp, Lilium asiatic
  Clone ID: LIB3230-030-P1-K1-E1
taaacacctgttctttaataacacagtccaagagtatgcttctggcgaaacagtgagagctattaactgccgccattgaaaaggattgggggccctctggaggtgtgaatgaggagtatctaagaccatggaatgcactgcttagcaacttccttcgattaagagccactgagcctgctccattgagtattccacattttattacggcactcaaaacgggatctgaagcaacacaggaagcatcattagattcacttttccttctcaggcaagcttggcagcatgcccagctgaagtttctaaagcccaatcagttgctgcatcagaggccattccttttactgcaatacttaattaagtcaggcccacctagattccaagataaggctgaacttctttgcagtgtctgccagggacacttactg

SEQ ID NO: 4757 - DNA, 421 bp, Lilium asiatic
  Clone ID: LIB3230-030-P1-K1-E10
tggcggtggaggctatggagggggcggtggtggaggcggtggggcctgctactcctgtggtgagcagggtcacatgtctcgtgactgccctactggcggcggtggcggtggcaggtatggcggcggtggcggtggaggtaggtttggaggaggtggtggcggcggcggcggcggttcctgctactcgtgcggtgagtctggccacttcgctagggagtgcccgtccaacagggggtgaatacctaacctgctctatttttatgttgtctttagggtttgcgctatgtttttgacccgtctcatatgacagtttgtgttttgggatgttaatggttggatctgtccttcctctggtttatgtggactttgatttcagtagtttgggggattttggcggtcttttttctccgagggacgaaga

SEQ ID NO: 4758 - DNA, 422 bp, Lilium asiatic
  unsure (1)..(422): unsure at all n locations
  Clone ID: LIB3230-030-P1-K1-E11
gatttatgtcccgccgccgtttgcggcggctgcgatcatggaggcgatggaggcggagctggatctggtggtgtgtatcactgagggaatcccgcagcatgacatggttcgagtaaaggctgctcttaacaagcaatcaaagacccgtttgattggaccaaactgtcctggcattatcaagcccggagaatgcaaaattggaataatgcctggatatatccacaaaccaggacgtattgggatcgtttctcgttctggtaccttgacgtatgaagcggttttccaaacaagtgctgttggtttagggcaatctacttgtgtgggtattggcggagaccctntcaatggaacaaattttgttgattgtgtgaagaaattcctggtagatcctcaaactgaaggtattgttcttattggagaga

SEQ ID NO: 4759 - DNA, 171 bp, Lilium asiatic
  Clone ID: LIB3230-030-P1-K1-E12
gcgatggaaccaatttgacgcgactatgcgatgtagcaccgtgaagagcactaggtgtgatgttgttcagaagtatagcagtaataacgacatcagtccaaaagggacgaacagaagcacaaagtagaagggaacgagtagtgttaatgatatggcgatgcttgtaccagc

SEQ ID NO: 4760 - DNA, 488 bp, Lilium asiatic
  unsure (1)..(488): unsure at all n locations
  Clone ID: LIB3230-030-P1-K1-E3
ccgtccgcgnnntgctctannaaattattttcttcggagggcccgggaataggaaaccctctggaaagggccaagccctttaactttaacaagaataatgaaccctgggtttggaccctaaacaaagggcaaaggtatttaatcggaaaggttaggcaaaaacccaaagttttaatcctgggaatggtaaatggaacctgccctaatgaaagaggaataatgtcaaggaattaactctacaaacccagaaattttttgggactcattgacgatatcgacactgttctggcatctgatgacaattttttactgggaacctggttagaaagtgccaaggaattagcaacanatcagaaagataaacagctgtatgaatggaatgcaagaacacaagtgacaatgtggtacgacaccacatagacttatcagagcaagcttcacgactatgcgaacaagttctggagtggactgttgaagagctactatct

SEQ ID NO: 4761 - DNA, 347 bp, Lilium asiatic
  Clone ID: LIB3230-030-P1-K1-E4
cgtgctctaaaattatttctcgaggccgtaaagaaccttgaaggcagccttacttacagatatgacctggttgacctaacaaggcaagtattatcgaagttagcaaaccaagtttatctggatgtaatgactggctatgaagagaataatgtcaaggaattaactctacaaacccagaaatttttgggactcattgacgatatcgacactgttctggcatctgatgacaattttttactgagaacctggttagaaagtgccaaggaattagcatcaaatcagaaagataaacagctgtatgaatggaatgcatgaacacaagtgtcaatgtggttctacaccacaaa

SEQ ID NO: 4762 - DNA, 361 bp, Lilium asiatic
  Clone ID: LIB3230-030-P1-K1-E5
cccactcttacgttgtctcgtgagcggacgcgtagctcgtcacggattcttagttacggatcttaccggcgttaccgcacatggtatagattgtcgtatttagcaaaccaagtttatctgtatgtaatgactgactatgaatagaataatgtctaggaattaactctacaaacccagatatttttgtaactcattgacgatatcgacactgatctgtcatctgatgacaattttttactgacaaccatgttagaaagtgctaatgaattagcaacaaatctgaaatataaacagttgtatgaatgttatacaagtacacatgttactatttctttctacaccacaattactatttatagca

SEQ ID NO: 4763 - DNA, 407 bp, Lilium asiatic
  Clone ID: LIB3230-030-P1-K1-E7
ggaaaagctagaggattaaggttttagtgatattcttctctcaagatctgatctgatgtgaagaagaatcaaaattgatcaaacaatgtgtaagtgattaattaaagagtgttgattcagtgacagtgtaatctttctattacatgtagttttagtgacatgtatctcttctgcgttgcttagtttaagttatcttcgtaagctatctgttaattactgatttctattaatggtcaaaggaaatcatgggccttaatttggaccaaacctttcttctagaaaacacagattattacgtgaagtttataatcaattaatgatgtaagactatataacaactaatgctattcgaatatagaattctttcataatcaaataatgtaattgatctatactttgaagaggac

SEQ ID NO: 4764 - DNA, 421 bp, Lilium asiatic
  Clone ID: LIB3230-030-P1-K1-E8
cggacgcgtgggtagtcgtagatctttttgtgaaattttatgacacagtaaatccgctcttgaggaaagtactgatgctactgacaagctttataaaacgtccgcatcaaagtcttgctggtattggtattgctgcctttgttcgtttaatgagcaatgcgggctctctgttcttcgaggacaagtggcttgaggtggtgttatcactaaaggatgccgctgcagcgacacatcctgatttctcgcttatttcatctgaaacatacttcgaggatgtggcaagagacgggtcaagcattgaagaagctgatgagtcaacagatgatgattcagctgtgctgagagaaagaaccttgtattttgcaatcaatgatgcaaagtgccgtgctgctgttcagcttctgttgattcaggctgtgat

SEQ ID NO: 4765 - DNA, 302 bp, Lilium asiatic
  Clone ID: LIB3230-030-P1-K1-E9
cggacacgtgggtagtcgcagatctatttatgaaattttatgacacactgaactggttcttgtggaaagcactaatgctcctgccatgctttatagaacaaacgcatcaaagtcttgctggtattgggattgctgcctttactacgttaatgaacaaagccgtctctctgctctttgattacaagtagcttgaggtgttagcatcatttaaggatgcctttgcatcttcacatacatgatcttcacgtgtatttaatttggaacatacctcaatgctttagatatagacggtttatgcattg

SEQ ID NO: 4766 - DNA, 429 bp, Lilium asiatic
  unsure (1)..(429): unsure at all n locations
  Clone ID: LIB3230-030-P1-K1-F10
gaagtatcagactcacttttctgaattcatcaagagggggattgatccggatcagattgaggagatgtacaagaaggtgcatgctgctatccgtgaagatccgacaatagtcaagtccaccaagccaccaccaaaggagcacaagaggtacaatttgaagaagctgacctatgaggagaggaaggctagccttgtcaagcgtttgaatgccctcaatgatgccaacaatgatgaagatgatgaggatgatgattgagcttttgttaaaccgactttaaattcatagtttgtctggagagttgaacttggtatctttgcgtttttatgttatgttggcagtttgtgttggtaacttggttctgctctttctcaagtactctgaaattttgacttaggctgctcaataactntttaaacttggctatcatt

SEQ ID NO: 4767 - DNA, 424 bp, Lilium asiatic
  Clone ID: LIB3230-030-P1-K1-F11
gaagtatcagactcacttttctgaattcatcaagagggggattgatccggatcagattgaggagatgtacaagaaggtgcatgctgctatccgtgaagatccgacaatagtcaagtccaccaagccaccaccaaaggagcacaagaggtacaatttgaagaagctgacctatgaggagaggaaggctagccttgtcaagcgtttgaatgccctcaatgatgccaacaatgatgaagatgatgaggatgatgattgagcttttgttaaaccgactttaaattcatagtttgtctggagagttgaacttggtatctttgcgtttttatgttatgttggcagtttgtgttggtaacttggttctgctctttctcaagttctctgaaattgtgacttaagctgctcaataactctttaaacttggcta

SEQ ID NO: 4768 - DNA, 433 bp, Lilium asiatic
  Clone ID: LIB3230-030-P1-K1-F12
tcggaagtatcagactcacttttctgaattcatcaagagggggattgatccggatcagattgaggagatgtacaagatggtgcatgctgctatccgtgaagatccgacaatagtcaagtccaccaagccaccaccaaaggagcacaagaggtacaatttgaagaagctgacctatgaggagaggaaggctagccttgtcaagcgtttgaatgctctcaatgatgccaacaatgatgaagatgatgaggatgatgattgagcttttgtttaaccgactttaaattcatagtttgtctggagagatgaacttggtttctttgcgtttttatgttatgttggcagtttgtggttggaaactggggtatgctcttatctaaggtcttttgaaattttgacttatgctgctcaactactctttaaacttggcttttat

SEQ ID NO: 4769 - DNA, 412 bp, Lilium asiatic
  unsure (1)..(412): unsure at all n locations
  Clone ID: LIB3230-030-P1-K1-F2
ggatgatgaatacgaggggaatgtagaggccagtggagaagatttctctgtagaacctactgagagtaggagaccattccgggctcttctcgatgttggcctaatcagaacaactacaggaaaccgtgtgtttggtgcactcaagggagcactagatggtggtcttgatattccgcacagcgaaaagaggtttgctggctttaagaaagacgacaagcagcttgatcctgaggttcacaggaagtacttgtttggtggccatgttgcttcttatatgcggactntgattgaggatgagccagagaaatatcagtcacatttcagccaatacatcaagaggggtgttgagcctgaacgctcggaggtgctgtacaaaaaggtgcatgctgccattcgagctgacccaacacca

SEQ ID NO: 4770 - DNA, 395 bp, Lilium asiatic
  Clone ID: LIB3230-030-P1-K1-F3
ctcggagaaatacatgttttgtgtgaacaggtgaaggaacttcataatgagctaaagcttgctcacagcacctcgacagagcagtatgaattggttttgggaaaggaggcagaacgggaggtcattgtagagaagtcagctgtgatttacacactgaacgtgaacgggccaaccttctggaaaaacaagtagaagagctgtatcaaaaactgccaaaatctgaagctcagtatgcaaaaaaggacgaagcatagctcaacaatttgaagcttaaactgagtcaggctgttgaactggagaagaaaattgtagagctcgtgaatgatctgaacgtggcaaatgccaaactagcggaacaggctaaggaaggaaccgtataagctcactctaacgat

SEQ ID NO: 4771 - DNA, 433 bp, Lilium asiatic
  Clone ID: LIB3230-030-P1-K1-F4
gcgggcggtagcaaggataatcgaattgggaaagtgagaatccggctttcgacattagagactgatcgggtttacacccactcataccctctcttggtgctacataattcgggggtgaagaagatgggggagcttcagttagctatcagattcacttgctcttctctgctcaatatgatgcatatgtattcacaaccgttgcttccgaagatgcactatctccacccgctctcagtgaaccagctggactacttgaggcatcaggcgacccagatagtctcgatgaggctgactcgagcggaaccgccaatgaggaaagaggttgttgagtatatgttggatgttggttctcacatgtggagtatgcgcaggagcaaagccaatttcttcaggattatgggcgtcttcagtggtttgattgcagttgggaggg

SEQ ID NO: 4772 - DNA, 338 bp, Lilium asiatic
  Clone ID: LIB3230-030-P1-K1-F5
gcgggcggtagcaaggataatcgtattgggaaagtgagaatccggctttcgacattagagactgatcgggtctacacccactcataccctctgttggtgctacataattcggaggggaagaagatgggggagcttcagttagctatcagaaccacttgctgttctctgctcaacatgatgcatatgtagtcacaaccgttgcttccgaagatgcactatctgcacccgatcttagtgaaccagatggactacttgtggcattttgcgacccagatagtctcgatgaggctgactcgagcggaaccgtcaatgaggaaagaggttgctgaggttatgtt

SEQ ID NO: 4773 - DNA, 242 bp, Lilium asiatic
  Clone ID: LIB3230-030-P1-K1-F6
gcgggcggtatcaaggataatcgtattgggaaagtgagaatccggctttggacaatggagactgagcgggtttacacccactcataccctctgttggtgctacataattcggggtggaagaacatgggggagctttagatagctgatatatacacttgcttttctttgctcaacatgatgcaaatgtagttacaacagttgctttcgaagatgcactatcttcacccgatctcagagaacca

SEQ ID NO: 4774 - DNA, 401 bp, Lilium asiatic
  Clone ID: LIB3230-030-P1-K1-F7
aattgtgtccaatgcaaagacatataatggagaggactacaatggggctaggattgtcagcaaagcctgtgagcttcgggatgtggtccgcagcatgctatcacaaattgatccatctttggtttcagtttgtgacaaaatcgcagcacaagggggtccagtggatgtgccagatgatttagggggcttgagttttccatcggcaccagttgtccaacatgctggggttactagagcgagtgcgaggcttcgtaacattcagccagaaataagcatgcaccacagttttgaagcattaaaccgcccaaagaaaagcaccgatacagagcaagcagggggttcaagtgcagaagataaatcaagggtggctaccaccactgaatcagaatcatcaaggcaca

SEQ ID NO: 4775 - DNA, 404 bp, Lilium asiatic
  Clone ID: LIB3230-030-P1-K1-F8
aattgtgtccaatgcaaagacatattatggagaggactacattggggctaggattgtcagcaaagcctgtgagcttcgggatgtggtccgcatcatgctatcacaaattgatccatctttggtttcagtttgtgacaaaatcgcagcacaagggggtgcagtggatgtgccagatgatttagggggcttgagttttccatcggcaccagttgtccaacatgctggggttactagagcgagtgcgaggctttttaacattcagccagaaataagcatgcaccacagttttgaagcattaaaccgaccaaagaaaagcacctgatactgatcaagcagggtgttcaagtgcagaagataaatcaagggtggctaccaccactgaatcagaatcattaaggcacagt

SEQ ID NO: 4776 - DNA, 406 bp, Lilium asiatic
  Clone ID: LIB3230-030-P1-K1-F9
aattgtgtccaatgcaaagtcatataatggagaggactacattggggctagggttgtcagcaaagcctgtgagcttcggcatgtgttccgcatcatgctatcacaaattgatccatctctggtttcagtttgtgacaaaatcgcagcacaagggggtccagtggttgtgccagatgatttagggggcttgtgttttccatcggcaccagttgttcaacatgctggggttactagagcgagtgcgaggctctttaacattcatccagaaatgagcattcaccacatttttgaagcattaaaccgcccaaagataagcacctgtacatatcaagcaggttgctcaagcgcataatataaatcaatgggtgggtaccaacactttatcacgatcatttaagctcatttt

SEQ ID NO: 4777 - DNA, 413 bp, Lilium asiatic
  Clone ID: LIB3230-030-P1-K1-G1
gccaaatgatgctcataggttttccattgagcatagcaggtttcttggaggggttgtcgaccatactcatttggtcaaaggtttggattatgctttgctaaacagggtaaggagtgaaattgttaagaaaccagacgaggatgaaaaggatggaatgccaaggatacctgtagatgataagccagtcacgtttagaactgctactgcgaagtcagtatatcaatggatggtcaaaccacaaagcattatcaaggctaatgagatgtttcttccaggaaggatggcatttatttttaacattgatgatgggttttctcatgacatccctactacagtgcatagaagtaaagctgattgcccagttccggaggaatggtcactggcagtgtggatggttcttgcttgagcgaatt

SEQ ID NO: 4778 - DNA, 240 bp, Lilium asiatic
  Clone ID: LIB3230-030-P1-K1-G10
gctgcatgggctgggacatgtttggtcaggccatgggcatgatctcatctggtgctggctctcttgatcactactatgaacatcaaactctcaagtcaagtacattggcccgtttgttgccggcgggccaaaggtgcttgtatgttcaaaaggacatatgaagctggtactatacatgacatgagatgtaaacagaacgcatgcgctctcctgatagggcctggaactgccgtattacat

SEQ ID NO: 4779 - DNA, 114 bp, Lilium asiatic
  Clone ID: LIB3230-030-P1-K1-G11
caggcatggagtagcacatatttattccccccaccttaacgagctattcggtgggtgaaccgggtgctcaaaaataccaccattaaactctgaagatgattacaaatgccgttt

SEQ ID NO: 4780 - DNA, 396 bp, Lilium asiatic
  Clone ID: LIB3230-030-P1-K1-G12
cccacgcgtccgggcagtcactcatcattggcatctacgacgagcccatgactcccgggcagtgcaacctggtggtggaaaggctgggcgactacctgctcgaacaggggatgtaacaacaaccccttcccctggaatgcatgttgatgatgttgctggttccaacttcgttttcagtaataataacaacaaagcgaagaccctcctacctaccctatttgcttgagcggctcttgtccgcgccacaagataccaattgttgcgctgggaatattcagttacgatgacccgctttagttcagttttttttttgggggggttggttcgatcatttggctgtagcgtgaatcgcatggacaacagactccaattactaagcaaatatttttcttctgc

SEQ ID NO: 4781 - DNA, 420 bp, Lilium asiatic
  Clone ID: LIB3230-030-P1-K1-G2
ggcaaatgatgctcataagttatccattgagcatagcaagtatcttggaggggatgtcgaacatactcatttggtcaaaggtttggattatgctttgctaaacaaggtaaggagtgaaattgataagaaaccagacgaggatgaaaaggatggaatgccaaggatacctgtagatgataagccagtcacgtttagaactgctactgcgaagtcagtatatcaatggatggtcaaaccacatagcattatcaaggctaatgagatgtttcttccaggaaggatggcatttatttttaacattgatgatgggttttctcatgacatccctactacagtgcatagaagtaaagctgattgcccagttccggaggaaatggtcactgtcagtgtggatggttctgtgcttgagcgaattgctaa

SEQ ID NO: 4782 - DNA, 423 bp, Lilium asiatic
  Clone ID: LIB3230-030-P1-K1-G3
ggcaaatgatgctcataagttatccattgagcatagcaagtatcttggaggggatgtcgaacatactcatttggtcaaaggtttggattatgctttgctaaacaaggtaaggagtgaaattgataagaaaccagacgaggatgaaaaggatggaatgccaaggatacctgtagatgataagccagtcacgtttagaactgctactgcgaagtcagtatatcaatggatggtcaaaccacaaagcattatcaaggctaatgagatgtttcttccaagaaggatggcatttatttttaacattgatgatgggttttcttatgacttccctactacagtgcatataaataaaagctgattggccagttcccgaggaaatggtcactgtcagtgtggatggatctgctcttgagcgaattgctaaaa

SEQ ID NO: 4783 - DNA, 297 bp, Lilium asiatic
  Clone ID: LIB3230-030-P1-K1-G4
ggcaaatgatgctcataagttatccattgagcatagcaagtatcttggaggggatgtcgaacatactcatttggtcaaaggtttgaattatgctttgctaaacatggttaggagtgaaattgatatgataccattcgtggttgaaaaggatggaatgccaaggatacctgtttatgattagccagtcacgtttagaactgctactgcgtagtcagtatatcaatggatggtcataccacaaagcattatcaaggctaataagatgtattcttcaggatggatggcattttattataa

SEQ ID NO: 4784 - DNA, 438 bp, Lilium asiatic
  Clone ID: LIB3230-030-P1-K1-G5
cgccagccaggaaggcagcagcgagaaagaatgcgcccaacttcagcgagatatctgatgaggaaactggtgacgaaaagatgccagcgatagctgaggatgatgatgacgatgaggattttgcagtggaggtttctgccccaaaagctaagaaaggtggggggcggaagcctgccgcgaacgccaaaccaccgaaagccgcagcgacagctgctacgagaaagcgagcagcggcaccgaaaaagcctgttatgagccagaagctgattactgaagtactgaagcctgcggagactgttgtgaactcacctgataagaaggtgaggaagatgagagcctcgccttttaataagaagagtgggtctgttttgggacggattgcgaatacatcgggagggagtgaggagtctgcgtctgggtctggcgggagctcgtcga

SEQ ID NO: 4785 - DNA, 439 bp, Lilium asiatic
  Clone ID: LIB3230-030-P1-K1-G6
cgccagccaggaaggcagcagcgagaaagaatgcgcccaacttcagcgagatatctgatgaggaaactggtgacgaaaagatgccagcgatagctgaggatgatgatgacgatgaggattttgcagtggaggtttctgccccaaaagctaagaaaggtggggggcggaagcctgccgcgaacgccaaaccaccgaaagccgcagcgacagctgctacgagaaagcgagcagcggcaccgaaaaagcctgttatgagccagaagctgattactgaagtactgaagcctgcggagactgttgtgaactcacctgataagaaggtgaggaagatgagagcctcgccttttaataagaagagtgggtctgttttgggacggattgcgaatacatcgggagggagtgaggagtctgcgtctgggtctggcgggagctcgtcgaa

SEQ ID NO: 4786 - DNA, 422 bp, Lilium asiatic
  Clone ID: LIB3230-030-P1-K1-G7
cggacgcgtgggaatatagtgaagttcaagttttgcaaagcatctgatatggtgaactcaagtgttttcaaagctcatactttagagcgcactattaagacatccaacccatggattttctccaattccgtccttcctatggatgagtcggtctcaaatattgtcagaatattcggtgaaagaatcttgttgaaggacacagacaaaagacctagagcttctagacggaaaggtagacggtcaatgtcattgaatgcaaagcgcaaggagaagtttcaaaatgatggagattggcaagagttgccagacaccccaccatgggatccctcctttggaggtgatggatgcccaaaatttctttgtgacgtaatggttgaagggttagcaaggcatctgcgatgtgtggggattgatgctgctac

SEQ ID NO: 4787 - DNA, 420 bp, Lilium asiatic
  Clone ID: LIB3230-030-P1-K1-G8
gttgcattggaaaggacaagtttggtgaggaaatgaagaaaaactcaacagctgctggtgttaatgttcactattatgaggatgaaactgctccgacgggtacatgtgctgtctgcgttgttggtggtgaaaggtccttgattgctaatttgtcagcagcaaattgctacaagactgaacatttaaagagtccagagaactgggcactagttgagaaggcgaagtacatctatattgctggatttttcctaacagtgtctccagagtcaattttgctcgtagctgagcatgcagctgcgaatgacaaggtatttatgatgaacctgtcggctccttttatctgcgagttcttccgtgatgcccaggagaaagctctgccttatgtggactatattttcgggaatgagaccgaagcaagga

SEQ ID NO: 4788 - DNA, 419 bp, Lilium asiatic
  unsure (1)..(419): unsure at all n locations
  Clone ID: LIB3230-030-P1-K1-G9
ccaccatcgactgccagctctccggccccgccggcggcatgatcgtctttgtctctggctccctccaactcgccggcgaacagcacactctcaagttcagtcagatgttccatctgatgccgacgccccagggaagcttctatgtacagaatgacatattccgcttgaactatgcatgaggtgagttataaacagcaggaatgtactagccagctaggacctgaaactgcagaattttattggacaaagattcatcttttattgagttgttttatggttgttcgaaggatgtcgaacttgttatagacttgccctaatgaaccaatgggtatttctatgtagattttgttccattgttggatgatgtgctttgttatcacggtcgctatgatgcaaacattaattntagctgtatcttg

SEQ ID NO: 4789 - DNA, 343 bp, Lilium asiatic
  Clone ID: LIB3230-030-P1-K1-H1
gacaacacatggactcacaaagtcttagcctcccttgcgctcaataggaacgtgagtgcacgaaaaggatgtatactggaaggctagtcttatccattgtagatagcgatgaatgagcttaacacccgcacgatacattttactacacggaggtattttgctgatacaagctctgaagatgggccatcggatgaacggatatttgtgtattcctgacagcatcaagtactctaagacccgatagcctgtacacaatatgcgagtcttgtctgaattatgagaatgacatgaccaactgtaacactttgacctacataaacatggatcgatgcgatgtgttagc

SEQ ID NO: 4790 - DNA, 432 bp, Lilium asiatic
  Clone ID: LIB3230-030-P1-K1-H12
gcggccgtcggccgctgttgcgatcttggggcctttggtggggacgtgtccggttgtcgatgataaagtcgtcgccgctggtccgatcggtgtcatcgagggagacgagggtgtgttgcagagggcattgaacctagtgcatagaaacagagatgactacgtagccatactcttctatgcatcgtggtgtcctttctcaaaaatttgccaaccaaatttcagcgttctgtcttccatgtttccctccattcgccactttgcattcgaagaatctgttatcaggccaagcatactctcgaggtacggagttcatggctttccaaccctattcctcctaaattctacgatgagggtgcggtttcatcatggatcacgaaccattaattcactggtggctttctatactgatgtgactgatgttaagcctgcatc

SEQ ID NO: 4791 - DNA, 169 bp, Lilium asiatic
  Clone ID: LIB3230-030-P1-K1-H2
gaccacacatggacttacaaagcttagcctcccttgcgctcaaatggaacgggtgtgcacgggaagggtgtatactggggggctagtctgatccattggtgatagcgatggatgggcttaagccacccacgattccttttactatacggtagattttgctgatacaagc

SEQ ID NO: 4792 - DNA, 430 bp, Lilium asiatic
  Clone ID: LIB3230-030-P1-K1-H3
gatttctagcgatcccctgccttcaagaagtaatggctcatcttcactggtatgatctctattttgtaggggttttccatgtcgtaaaagtaagccttcacttttattaaaggctggtgacgtgagtctatgcgtgatgaagaagtcgatgccgatgatagatctatgttgaagtccaacccaattaatcaatccaccaccgattacccaccacggcggagatagcatagaggcaaatcgtaggatattgaaaacccataatgaaaaaacaaaaacaagttcaatgtaataaagagagaagaagcatacaaaaggacgagagatcttacatgatttacccctcttcaagctatgcccacggccaccataatcaatccactagaattgtaatcaaagacttgcaaaaaagtttgggtgctggcccaaatta

SEQ ID NO: 4793 - DNA, 413 bp, Lilium asiatic
  Clone ID: LIB3230-030-P1-K1-H7
cacaattctccaagctctttcgtttctcgaagtccctctatggccgctgtagagtcagccaccgctgatacaattgagtctcaccctgttaagcctaccttggtcgaggggccagccatatcagatgtccctccggtgaagctggccaaggtgaaggccacgaaggctcccaaggaaaagaaggccgtgacaaagaagccggccctacatcctacctatctcgagatgatccgcgaggcgatagcgtccctcaaggatcgaaccgggtcaagccagtatgcgatctcaaagtttgttgaagacaagcacaaggctcacctcccggcaaactttaagaagctactccttgttcagctgcggaaactcaccgctgctggcaaactcaccaaggtcaagaactcttacaagatcgc

SEQ ID NO: 4794 - DNA, 398 bp, Lilium asiatic
  Clone ID: LIB3230-030-P1-K1-H8
tgaaaatggctgaaggaatagttgatctggccatagatgagacatgccaagcagatcaattggaatttttacggttaaaagcattacttcaagctgctcaggagcggcctaagaatgccatcgatacctatggaactttacttgccatgattcagacacagaagaaaactgagacttggatccctaactctgaggtaaaacgaagccaaaatatggaaatggaagcatggctagatttgacttccatatataccaagcgcggatcatggactgatgcaaacatttgtttggataaagcaaagtctattgggtatttctctccaaagagttggcacataacaggcaagctgtttgaagctcagtcgtcacacaataaggctctagcagccttttcaaca

SEQ ID NO: 4795 - DNA, 404 bp, Lilium asiatic
  Clone ID: LIB3230-030-P1-K1-H9
cgaaaatggctgaaggaatagttgatctggccatagacgagacatgccaagcagatcaattgggatgtttacggttaaaagcattactttaagctgctcatgagcggcctaagaatgccatcgatacctatggaactttacttgccatgagtcagacacagaagaaatctgagacttggatccctaactctgaggtaaaacgaagccaaaatatgtaaatgggagcatggctagattggacttccatatttaccaagcgcggatcatggactgatgcaaacatttggttgggttaagcaaagcatttcgtggtttactttccaaagagctggcacataacaagcaatgtgtatgtagctcaacccgcacacatttaggctcttgcaggcttgttaacatttttt

SEQ ID NO: 4796 - DNA, 382 bp, Lilium asiatic
  Clone ID: LIB3230-031-P1-K1-A11
gaagaatggggagacttacaacgggcatctggtgaattgtgatacgtggatgaacattcatctccgtgaggtgatctgtacctcaaaggatggagatagattctggaggatgcctgagtgttacatacgtgggaataccatcaagtatctccgggttccagatgaggtgatcgataaggttcaggaagaaaccacaaagtctcgcttagataggaagccacctggtgttgggcggggaagaggaagaggtagagatgacggtgggagcaggcctgccaaaggcattggtcgcgggcaggatgacggaggtggtagaggaatgggtggtggtcgtggcagggctggacctggtggtggtagaggtggtggcaccagaagaggt

SEQ ID NO: 4797 - DNA, 254 bp, Lilium asiatic
  Clone ID: LIB3230-031-P1-K1-A12
tcggaagaatgggtagacttacaacggtcatctggtgaattgtgatacgtggatgaacattcatttccgtgaggtgatctgtacctcataggatggagatagattctggaggatgcctgattgttacatacgtgggaataccatcaagtatctccgggttccagatgaggtgatcgataaggtttaggaagaaaccatcaatgtctcgcttagataggaagccacctgttgtttgacggtgaagatgaagaggt

SEQ ID NO: 4798 - DNA, 379 bp, Lilium asiatic
  Clone ID: LIB3230-031-P1-K1-A2
agaattctggccttgatacacaggatgccattatagctctaacggatgaacatgagaaaggaaatattgtgggcttgaaccataacactggagatcctatggacccccagatggagggaatctttgacaattactcggtgaagcggcaaatcataaactctggacccgttattgcctcccagttgctgctggtagatgaagtgatccgtgcaggtcggaacatgcggaaaccaacttagaagtcggtacaaatttgggaagcataattttgatacggtggttatctgaccagcggtgtggttgaggagaactggacaaatgattcctgagttatctggttgtgtaatgtattaacctttaaagatcacccggattgtta

SEQ ID NO: 4799 - DNA, 239 bp, Lilium asiatic
  Clone ID: LIB3230-031-P1-K1-A3
gtagtacctactgcacaagctcaccatcttcatgcggttcaagatacataccgtacaaaatggtattgctcaaactgcaagactagcatggaggatcatacgatggacccttgtctatcgaactctcgacacagaggagaggctatgctggaactcaaagcgaggaggatcataggccggaacctactatattgaactattccagctaccggacatatgctgtctatatactgtatgaa

SEQ ID NO: 4800 - DNA, 253 bp, Lilium asiatic
  Clone ID: LIB3230-031-P1-K1-A4
gtactacctacaacactagcttacaatcttcatgctattaaacatccaaacaggggcgggtggtttagctcatactacaagactagcatggaggttcaaagctagagacccgagcaattcaactcttgcacatagtagattctacgctgtatttcaaatcaaggagttcttaaggacgttaccgtcctatatcgtactattctagctgccttcctttttcttaatttatactatatgtaattagtttctgaat

SEQ ID NO: 4801 - DNA, 399 bp, Lilium asiatic
  Clone ID: LIB3230-031-P1-K1-A5
cgcgccgccgccgctgctcgtctccgccgttcgccgccgcatctgccaccatgggtcgcatgcacagccgcgggaaggggatctcctcctccgccctcccctacaagcgcactccgcccagctggctcaagatctccgcccaggaagttgacgagagcatctgtaagttcgcaaagaaaggcctcaccccttcccagatcggcgtgattctccgtgattctcacggcatcgcccaggtgaagagtgtcaccggaagcaagatactccgaatccttaaagctcacggactggccccggagattcccgaggatctgtatcacttgatcaagaaggcggtggcgatccggaagcatctggagaggaacaggaaggataaggactcaaagtttaggctgattc

SEQ ID NO: 4802 - DNA, 405 bp, Lilium asiatic
  Clone ID: LIB3230-031-P1-K1-A6
caacccctccgctgcgatgacgaccgttcccggctctctgatctgggagcttgtgaagaacaacaacgcgttcctggtgaagcagttcgggaatggcaacgccaaggtgcagtttagcaaggagagcaacaatctctataacgttcactccttcaagcactccgggcttgcgaataagaagacggtttcgatccagcctggggggaaggatctgtctgttgttcttgctacaaccaaaactaagaagcagaacaagcctgcagcgctgtatcacaggtcggtcatgaagaaggagttcagcaagatggcaaaggctgtcaagaatcaggtagcggacaactactataggcctgatctgaccaaggctgcccttgcaaggctgagtgttgttcatcgcagcctcaa

SEQ ID NO: 4803 - DNA, 253 bp, Lilium asiatic
  Clone ID: LIB3230-031-P1-K1-A7
cgacccctcggctgtgatgacgtccgttcttggctgtctgatctggcagcttggggagaacaacaacgcgttgctggagaatcatctcgggaatggcaacgtccaggtgcagtttagcaaggagagtaacaatctctataacgttgactccttcaagcactcggggcttgcgaataaaaagactgtcttcttccagcctgaggggtacgatctgtatgttgatcttgctacacccgagactagtaagcacaac

SEQ ID NO: 4804 - DNA, 117 bp, Lilium asiatic
  Clone ID: LIB3230-031-P1-K1-A8
cgtacgacctcctgcagaagctcacaagtccgatgctgtttaacatacctgccggcatgagtggtatagctaagcgtgcctggctaacctggatgttcatagtatcagcacatgtgc

SEQ ID NO: 4805 - DNA, 146 bp, Lilium asiatic
  Clone ID: LIB3230-031-P1-K1-A9
atctccctcggctgcgatcacatccgttcccagactctctgatctggcagcgtggggagaactcaaactctttcctggcttatcatctcctgaatgccaacgcacatgtgcactttatccaggttagccacgatctttataacgta

SEQ ID NO: 4806 - DNA, 241 bp, Lilium asiatic
  Clone ID: LIB3230-031-P1-K1-B1
ttgtcacttgaccccgagcgcgctctcgcaccctcaactgtctgagtaagccttctatcccacacgtttttgcatgacagagttggtggtggcgatggatatcatccggctgctccctaccacttattaccctccgggaagaagcagcatcaccatctgttcaatcaacaagtttgtaaggctgcactggcttggtgtgtgtgatatcggagtaaatcgaatactgtcttcaggtttctta

SEQ ID NO: 4807 - DNA, 283 bp, Lilium asiatic
  Clone ID: LIB3230-031-P1-K1-B10
ctccgcagagcccccttatgacgccgtcccaatccgtgtagtgagatggcgggctccgatcattttcagtaatgcagattctggatgggagttgccgatcatggaaggatatttttctagagcttataggaagaagatatattgctatgtggtttaaatttgatgagaagaaaaggtagtttagaagagtagaccgtagatgcgttgagagctacatgtcttacgtgttattacctgaagatgatagcctaatgctgtctaagattttgactttgttacacat

SEQ ID NO: 4808 - DNA, 397 bp, Lilium asiatic
  Clone ID: LIB3230-031-P1-K1-B11
gcaccggatcttttctcaaagttgtggcgaaaaacttcgatgttctcgccgggccttttgtgacactggtctatcccttgtatgcttcagtcaaggccatagaaaccaaatctccaattgatgatcagcaatggctcacttattgggtgctgtactctatgcttacactcttcgagcttacttttgccaaagttattgaatggttaccattctggactcatgcaaaactgatcctgaactgctggttggtcctaccctatttcagcggcgcagcctatgtttacgaacatttcgtcaggccattatttgtgaagcaacaaactgtcaacatctggtatgttccaggaaagaaggatgtcttcagtagacccgatgatgtcctaacagccgcggagct

SEQ ID NO: 4809 - DNA, 204 bp, Lilium asiatic
  Clone ID: LIB3230-031-P1-K1-B2
cctccattggatctctctcactcgctcgccgtctccaagggtcacctgagatcacattagcaaatggggaaggctgttgttgtgctcaccagcagcgagggcgtggctggcactgtgtcctttgtccaagaaggcgatggtccgacgacggtgaatgggactctgtccgtgctgaagcccggcctccatggttttcatgtgcac

SEQ ID NO: 4810 - DNA, 400 bp, Lilium asiatic
  Clone ID: LIB3230-031-P1-K1-B5
ctctcctccaagtgaacctcctataacaaagatgtctactagctcggatgggcagtggttagctgctatcaactgttatggtgatatctacatatttaacttggagattgataggcagcattggttcatagccagattgaatggggcttgtgttactgcttgtggtttcccccctgccaacagtaacgtgcttgtcatcacaacatcttcgaatcaagcctatgtatttgatgttgaagcaaaacagttgggtgagtggtcatggcgccacacaccttctctacctagaaggtttcaagaatttccagtcgaggttaattgtatatcttttccaccttgaaaatcgacattagtgatagtctatagtacaagggcaatgtgcttgattgtcttcggtatg

SEQ ID NO: 4811 - DNA, 163 bp, Lilium asiatic
  Clone ID: LIB3230-031-P1-K1-B6
gagccctccgctgtgatgacctccgtcctcggctgtctgatctgccagcctgggtagaatgcccatgcgtggcttgggaatctactcctgagtgccaacgtacaggcgcacttctgccaggtgtgtcacgatctctatcatgacgctgactttagcatttgga

SEQ ID NO: 4812 - DNA, 82 bp, Lilium asiatic
  Clone ID: LIB3230-031-P1-K1-B7
aaagccgtcggctgtgatgacaaccgttgacggctgtttgatctggcagcatgggtagaataaaaatgcgtggcttggaaat

SEQ ID NO: 4813 - DNA, 179 bp, Lilium asiatic
  Clone ID: LIB3230-031-P1-K1-B8
cgcgccctcggctgtgatcacctccgtcgttcgccgtctgatctgccaccatgggtagaatgcacaggcgtggctagggaatctcctcctgagtcctaacctacaagcgcacttcggccaggtgagtcacgatctccatccaggaagttgactagagcatctgtaagcttgcaaagaaa

SEQ ID NO: 4814 - DNA, 404 bp, Lilium asiatic
  Clone ID: LIB3230-031-P1-K1-B9
ctccgacaagagcccccttctgcgccgccccaatccgcgtcgtgagatggcgttgctccgatcattttcagtaaatgcagcttctgggatgggagttgctgatcattgcaaggatattttcttagagcttcagaggaagaagatatatcgttatgtggtttttaaaattgatgagaagaaaaaggaagttgtagtagagaagaccggagatgcaggtgagagctacaatgacttcacggcttctctacctgaagatgattgccgatatgctgtctatgattttgactttgttacacaagagaactgtcagaaaagcaagatattcttcattgcttggtccccagatacggcgcgcattcgagccaagatgttgtatgctacctccaaggaccgattccggcgag

SEQ ID NO: 4815 - DNA, 402 bp, Lilium asiatic
  Clone ID: LIB3230-031-P1-K1-C10
gcaagctgtatccgtcttccaaccgactgtatggtcagtatgggaatacatacagatctgtttctggatatggaccaagttggtacgattctaggatcaatgggcgatggagcttggttacagacaacaagtacaagcctagaggccgaggcaacggttcatatggctatggcaatgaaaacctggatggttttagtgagctcaacagaggaccaagagctggatgcttaaaaaatccgaaggctgttggaccaaatgtcacaattgcagtgaagggacagaacctatcctcaacgcccaatgaggatgttagtgcagtactcccagacaaggagcagtataaccgtgtagacttccctgaaaaatatacaaatgcaaagttctatatcatcaaatcataca

SEQ ID NO: 4816 - DNA, 397 bp, Lilium asiatic
  Clone ID: LIB3230-031-P1-K1-C11
cggacgcgtgggtgagagcaggaggcctttccgtgctctccttgatgttggtcttgtcaggacaactactggaaatcgagtttttggtgctctcaagggagccttggatggtggtcttgatattcctcacagtgacaagaggtttgctggtttcaagaaagatgacaagcaactggatgcagagattcataggaagtatatctttggaggacatgttgcctcttacatgaggtctctgattgatgatgagcctgagaagtatcagactcacttttctgaattcatcaagagggggattgatccggatcagattgaggagatgtacaagaaggtgcatgctgctatccgtgaagatccgacaatagtcaagtccaccaagccaccaccaaaggagcac

SEQ ID NO: 4817 - DNA, 309 bp, Lilium asiatic
  Clone ID: LIB3230-031-P1-K1-C12
ctgattttcaacgctttatcaggctttctaaagatgaattatttggttcttcctctactggagataacctgaagtcccgtggaaaactttatgaccaccggcctcttactctgaatgatgatgactatcaaagggtatgccagattccaaagagaaagggtgcttgttttcgggatttgcctggtgttattgttgggccaaacaatgttgttgaatttgatcccaatgttgagagggtgtacttacacatctgggaatcccttgtttcctgagaatgcaatgtcctttgtggatggaaaatcacccaaa

SEQ ID NO: 4818 - DNA, 359 bp, Lilium asiatic
  Clone ID: LIB3230-031-P1-K1-C2
gagcaattggacgctggggtattgctgtcgacaacaagtacagacctaggggccgaggcaatggtttgtatggttataacaatgaaaatttggatgggttgagtgagttaaacagaggaccaagagctggccgcttcaagaccccaaaagtggctggacccactgttaccattggtgacaaggatcatagtgcagtacctgataaggatcagtataaccgagcagacttcgttgaaaattatccggatgccaaatttttcatcattaaatcgtatagcgaggatgatcttcataagagcattaagtataatgtctgggccagcacacctaatgggaacatcaagctagatgctgcatac

SEQ ID NO: 4819 - DNA, 406 bp, Lilium asiatic
  Clone ID: LIB3230-031-P1-K1-C3
cggacgcgtgggcgaaacttgaaatgtggattgccactatcaggtgtcttccgttagccagccaggagtcgtgtggtgccattgaaggttaccatacaaagctcaagctcaaagtgtatgacgattcgcgtctcggtgcactccagcgcgtggattggctggtccacaagctcacgactgagctacattccagctactggctcgatctttacgcagacgaaagtggtctgtttcaaacagtgaaagaggaatatgtttcttccacttcgtggcacagagcactccaaattccagatactgctgttgtgtttgacgataaagagaatctatttgcgaaggtcaaaagccagaaagatgagcaggaagcacacacggtttggaatccagggtcagaatttgcgttctg

SEQ ID NO: 4820 - DNA, 407 bp, Lilium asiatic
  Clone ID: LIB3230-031-P1-K1-C6
cccttgataaacagatgattttgagatacctgggtgctgatctgtatgttacggattataaacttggattccaagggctagctgacaaggtggaacagctgaaagaaaaggacccaaatatgtatcatctaaatcagtttgctaatccagcaaatgttgaagcacacttcattggcactggacccgaaatctggaaagacacagcaggcaaagtggatattcttgtatgtggttctgggtcaggaggtacagtaaccggtgctgggaagtatctcaaaatgaaaaaccctcttgtgaagatcatttgtgttgaacctgaagagagtcaagccatttcagggggcagtataggcccacacaaaattcaggggttggccccaggttttgttcctcctattcttgatatg

SEQ ID NO: 4821 - DNA, 69 bp, Lilium asiatic
  Clone ID: LIB3230-031-P1-K1-C8
tgcgcggtcagcggtgatgacttacatctacgggcgcttgatctgacagcgggggttgaatgcaaaggc

SEQ ID NO: 4822 - DNA, 83 bp, Lilium asiatic
  Clone ID: LIB3230-031-P1-K1-C9
tcgctacccgtcggctgtgatgactaccgtttacggccgtctgatctggcagcgtgggaagaacgataatgcgtggctaggga

SEQ ID NO: 4823 - DNA, 285 bp, Lilium asiatic
  Clone ID: LIB3230-031-P1-K1-D1
ctctcctccaagtgaacctcctataacaaagatgtctactagctcggatgggcagtggttagctgctatcaactgttatggtgatatctacatatttaacttggagattgataggcagcattggttcatagccagattgaatggggcttctgttactgcttgtggttttccccctgccaacagtaacgtgcttgttattacaaacatcttcgaatcaagcctatgtattttatgttgtagcaaaaacagtttgtgtgagtggtcatagcacccaaacaccttctt

SEQ ID NO: 4824 - DNA, 284 bp, Lilium asiatic
  Clone ID: LIB3230-031-P1-K1-D10
gttcaaaccatcaaacaatatatttgttcatgttttcatttgcttttactgaagggggtgcaagtcataatgaccagaatttattcaatgctttaaaatatgatcccttcatatttgaaatatgcctccaaatcatgattttaagtaccacccattttgtatgaattcgatagccaagtaaataccttaataaggttagtacattgcattctaactgttgtattggttcgaattgcatgcttatatgtttaggattattgctttatgattgttggagatttatg

SEQ ID NO: 4825 - DNA, 403 bp, Lilium asiatic
  Clone ID: LIB3230-031-P1-K1-D11
ctactatccgccgccggagactacagcgaagtacgagatgccggccggtcatgggcagcgctcgcgcacgcgcgacctcttcgcccgtcccttcaggaagaaggggtacatcccgttgacgacgtacctccgcacctaccacatcggtgagtatgtggatgtgaaggccaacggcgccatccacaaggggatgcctcacaagttctaccacggccgtaccggtcgcgtctggaacgtcaccaaacgcgccatcggcgtggagatcaataagcaggtggggaacaggattatcaagaagaggatccatgtgcgtgtggagcatgtgatgccctcgaggtgcactgaggagttcaggctgaggaagataaagaacgaccagttgaaggctgaggcaaaggctcgt

SEQ ID NO: 4826 - DNA, 224 bp, Lilium asiatic
  Clone ID: LIB3230-031-P1-K1-D12
acgtactgtacacacattggtgcgtctgattatttggaggacggctgatacattcacatagatatgccttactagttctaccaggaacatactgttatcttttgttacgaaagcaaacgctcgatcggcttgatgatcaatgaaagagttgtttacacgattattatgtattagtatccatgaacctgatgcgcatgtcttgcacttttgaagtactctttttt

SEQ ID NO: 4827 - DNA, 181 bp, Lilium asiatic
  Clone ID: LIB3230-031-P1-K1-D2
ctgtaattcaacgctacgttctatatcataacatcaaactcagtcctatgggcagagggagcatctataagcttataacaatgtatatacatatggaactagtgaattgatcggaggaccaagtgcatagccagactagacggcacatgtggtactgctcactgttaccattgttggacaa

SEQ ID NO: 4828 - DNA, 402 bp, Lilium asiatic
  Clone ID: LIB3230-031-P1-K1-D3
gagcaattggacgctggggtattgctgtcgacatcaagtacagacctatgggccgaggcaatgatttgtatggttataacaatgaaaatttggatgggttgagtgagttaaacagaggaccaagagctggccgctttaagaccccaaaagtggctggacccactgttaccattggtgacaaggatcatagcgcagtacctgataaggatcagtataaccgagcagacttggttgaaaattatccggatgccaatattttcatcattaaatcgtatagcgaggttgatcttcataagagcattaagtataatgtctgggccagcacacctaatgggaacataaagctagatgctgcatacaaggaagctcaacagaatccgttgcttgccagagtttttgttt

SEQ ID NO: 4829 - DNA, 405 bp, Lilium asiatic
  Clone ID: LIB3230-031-P1-K1-D4
gacgatttgttggcggtcactgtttactctctcaaacaatcggcactaacgcccgcaataactggtttcatctccggcaattcttttctacgaaagaagcacattcttgagaaatctacataacaaaagatgttctgtgagaccgcttcttttaacttcggagccatcggatatctataggaagaagagagaacaaactattttgagagaaaaaagaaagaaaatgataaaaataaacacattccaaccactagtatttgaagtccaaagtcaaatacgtacacactgtgcaaacaaacaagcacatggattttatctacctatatcaattatgtgtatttacatataggcttcgttaaaagttgatttctattgaaatatgccaaattgggaaatgagaaacac

SEQ ID NO: 4830 - DNA, 406 bp, Lilium asiatic
  Clone ID: LIB3230-031-P1-K1-D5
ggtcaaaccatcaaacaatagaattttacaagttttggtatgcttcgagggaagaatatccagggcatcatgaccagaatgtattcaatgctataaaatatgatcccttcatatcggaaataggcctgcagatcaggtttttaagtaccacctactttggtggaatttgtgagccaagtaaagacctgaataaggtttgtacaatgcatacaaactgttgtattggtttgcagagcaagcttattgatttaggagtaatgctcgaggattggaggagattcatgtccctgccgcccattctaaaagaatctcatgttctatcttggaggataccaaaaaattgcagcttacatcatgattagaacctttcaagaaaattgctgccctaagaccttagatcgctttt

SEQ ID NO: 4831 - DNA, 398 bp, Lilium asiatic
  Clone ID: LIB3230-031-P1-K1-D6
gatcgacaaggcaatgccttgaagccttgaaaactgtcggatttgaggttatatgggagaaagatctggctgtagactcacctgtatcatggtatttgcctctcgatacaagccacttctctataaccagcttccgtctgacaactttcggccgacttatcactaggacgatggttaatacactagaatacatcggccttgctcccgcgggaagcaatagagtttcatctttccttgaaaaggctgctgaaggcctggttgaaggaggaaggaaagagatctttacaccattgtacttcttcgtggtccggaagccgctcctagaatcttgaagcttgaaggtcgacttttcgagctgtgattggcttgtgaggtttgccaatatcccgtagtttttc

SEQ ID NO: 4832 - DNA, 400 bp, Lilium asiatic
  Clone ID: LIB3230-031-P1-K1-D7
gcaccggatcttttctcaaagttgtggcgaaaaacttcgatgttctcgccgggccttttgtgacactggtctatcccttgtatgcttcagtcaaggccatagaaaccaaatctccaattgatgatcagcaatggctcacttattgggtgctgtactctatgcttacactcttcgagcttacttttgccaaagttattgaatggttaccattctggactcatgcaaaactgatcctgaactgctggttggtcctaccctatttcagcggcgcagcctatgtatacgaacatttcgtcaggccattatttgtgaagcaacaaactgtcaacatcctgtatgttccaggaaagaaggatgtcttcagtagacccgatgatgtcctaacagccgcggtgctcta

SEQ ID NO: 4833 - DNA, 398 bp, Lilium asiatic
  Clone ID: LIB3230-031-P1-K1-D8
ggaattgtcgctgcactagtgtctcgttatcagttgaatttcacaaggcaggatgttgcctctctttggtttctctgcaagcaggaagcatctctgttagacatcacgaatcaagcttgtgggctttttaacccttctgaggtttctttacttgagtggactgatgacctagaggcttttgtattaaaaggctatggtaattcagtgaactatcgcatgggagtaccattacttgaagatgtggtccagtcaatggagcaagcaattgtcgctaatgaagagaatcataaacctgggaattttgagaaggcaagactccggtttgctcatgctgagaccattgtaccttttacttgtctcctcgggctctttcttgaaggatctgagtttgagcagat

SEQ ID NO: 4834 - DNA, 398 bp, Lilium asiatic
  Clone ID: LIB3230-031-P1-K1-D9
cggacgcgtggggtggttctgtttttctatccactggacttcacttttgtgtgccccacagagataactgctttcagcgaccggtactcagaatttgagaagttaaacacagaagtactgggcgtttcagtcgacagtgtgttttcccatcttgcatgggtccaaacagatagaaagtcaggtggactcggagatctgaactatcccctggtatctgatgtgacgaaatcaatttcaaaatcttttggagtactgattcatgatcagggaattgcattgagaggtcttttcatcatcgacaaggaaggtgttatccagcactctaccattaacaatcttgctattggcaggagtgttgatgagaccatgagaactcttcaggctttgcagtatgtgca

SEQ ID NO: 4835 - DNA, 356 bp, Lilium asiatic
  Clone ID: LIB3230-031-P1-K1-E1
cggacgcgtgggctttcatggactgagaggagacccagacaagggaaggaatcatctgtacttactagatcctgcctgttggctctaagtgtggatgatggtgctgcaggggctctactgaggaggttgcacctgtacaatatagataaaatggacagttctgcattatgctcagcgttatcagcctgccagtctctcatagatttggaagttattggcctacacattgaggctgaacgaacactggactcggtgagctcatactgtcacttgattgaacggttgttcttggagtcttctgaaactgggagagatgatagtttgaagccctcaaactgtgttgatctggttgatgg

SEQ ID NO: 4836 - DNA, 337 bp, Lilium asiatic
  Clone ID: LIB3230-031-P1-K1-E10
accgttcggaatgacccgccgagccaccctccttccggttactcaagaaaggtcttattctcattgaattggctctgtagctccaggctattttgctgccgttcttgagtacctcgctgttgaggttctagtgttgacttggcaatgctgccagtgtcaacaagaagtaccgtattgttccccgacatgtgtgcttagctgtttgaaatgttaagtagcttttgaggctattgtacgttgttacttttactcattgtggagtcttctcgaaattaacccgggtctactgtctaataatactggtaaagaattatgatgtctaattctactaatataa

SEQ ID NO: 4837 - DNA, 400 bp, Lilium asiatic
  Clone ID: LIB3230-031-P1-K1-E12
gggtcggcccacgcttcctctaatacatctcttgctgtaaaggacatggccactgaactctcttacaatttggggggaacgttcatagttctagttgtactgtattgttccatgataaccaacttgggcaagtttttatctgatacattgagattctactactttgatagtcaagcaagctgttgtcggtgtgtttattgttgtcccttttcaataaagggattaatagggtttcagaaattttgagtctgaattgtttaagcagttattatccatgtgccgatttgttgtttgtgcttttgacgttgctgttcatagcttaactaatttggtttatataaatttatattattttatcgatttggatatgatgttttaattagatttttttaacatatta

SEQ ID NO: 4838 - DNA, 401 bp, Lilium asiatic
  Clone ID: LIB3230-031-P1-K1-E2
ctccgcctcgcgccgccctcctccggcaaatcatcccctccaagtagatccatccaagcccaaaatccagctatggcctcgcaagcatctcccgattattttccctatatcaattttggaatctatcgagggatttgtgagttctaacaccttcgatcgccggcgattctccgactgtcatactcgattgcttcatatctctgaggcgattctattacaggtaagagttgtactttggatgtttttatctaatgatatttacgtgatcatttaggtcgccgacgggatgatttggaagtattctgggagcatgaggagtatctaacgatagaggttataggaacaacattccttggacaccaaggaagagatagagcgtgaagagatggagcgttgtttga

SEQ ID NO: 4839 - DNA, 403 bp, Lilium asiatic
  Clone ID: LIB3230-031-P1-K1-E3
ggcaagtgatcttcgatcatctcttgaaagatctaaggatggattgctgaatattacgctgtatatcagctatcttgcggactatattgtggagcttgaccatgaaaatgtcaccgggcctgtgggcttccttgcggatgttggtggtctttatgctttaagtgttgcaattttcctatacttcttggtgcaatgtgaggtaaggagtaagaaattgcgtaacgaggatactgtcatgcgaaacattagaagtcagagacgtgctctacgaaattggaataagttgaggaaatttgtcatgtacacctgggggcctagcaacctggatggagaaaataattgggtcaaacggcaaggaggtatgaagacggattcttgttgtggaattagatctctgcgcgaa

SEQ ID NO: 4840 - DNA, 321 bp, Lilium asiatic
  Clone ID: LIB3230-031-P1-K1-E4
gagcaattggaccctgaggtattgctgtcgacatcaagttcagacctaggatctgaggcaatgatttgtatggttataacactgaaaattgggatgggttgagtgagttaaacagaggaccaagtgctgtccgcttaaagaccccaaaagtggattgtctcactgttaccattggtgacaaggttcatagggcattacctgttaaggatcagtataaccgaacagacttgtttgaaaattattccgatgccaaattttttatcattaaatcgtatagcgaggttgatattcataagagcattaatgataatgtgtgggcca

SEQ ID NO: 4841 - DNA, 408 bp, Lilium asiatic
  Clone ID: LIB3230-031-P1-K1-E5
ggccgcttcctcaagaaaggccgctattctcagcgtgttggctctggagctcctgtctatctcgctgccgtgcttgagtacctcgctgctgaggttcttgagttggcgggcaatgcggccagggacaacaagaagaaccggattgttccccgacatgtgtgcttggctgtgagaaatgatgaggagcttgggaggctgttgggcggtgttacttttgctcatggtggagttccgccgaacatcaacccggtcctgctgccgaagaagactgggaaagaaggggcggagccgaagtctccgaagaaagctactaagtcccccaggaaggcttaagttgttgaattgattctggctttctatatgtaatctactggattaccttggtttggaatgttggtgcaaaatcga

SEQ ID NO: 4842 - DNA, 404 bp, Lilium asiatic
  Clone ID: LIB3230-031-P1-K1-E7
ctgacgcgtgggcggacgcgtgggccgaattctacacctcagtctatggaggttgacgtgaaacataaagatataaagaagcttaaaaaggtaaaaccacctagaggacccaaaaaatcttgtagtactgaaggaaccaacatgggcaggaaggtcattgcagaggcaacaagcatagatgttggtgtgactcagaacaaggaagtcggcacgcccaaaaaggcactagtaagagaaagaaaacggacttcatccgctaaagtggaatctgcaaagccgaaataccttaaagatgtcgacagaaggatttccaaagcagaaaaaaatgccacttctaccgaagcccgggaatcgatgtccactgtacaaccaatagcattatcgaaaaaaaggaagttccaaac

SEQ ID NO: 4843 - DNA, 201 bp, Lilium asiatic
  Clone ID: LIB3230-031-P1-K1-E8
cgtcaccgtatggccaaatcgtcattgaaaaataaaaaaacgtcgtttaagcccttttatcgaaaaatataaaaaaattatatatataatatataaataaataatacattataatgttataacatatatctttattatatataatattaattatatatataagtatctaaacaaacagataaaagcgataactaaaaaaca

SEQ ID NO: 4844 - DNA, 187 bp, Lilium asiatic
  Clone ID: LIB3230-031-P1-K1-E9
cgaacccttaatgtaaaatattcaatttaacatacaaattcatccttgaagagaggttatttataaatttaatataatcataacatataatacataaacaaaacatacatcataatgttataacctatatctttactatataaattactaattataacattaagcatctacaaaaacacataataac

SEQ ID NO: 4845 - DNA, 163 bp, Lilium asiatic
  Clone ID: LIB3230-031-P1-K1-F1
tcgctctcgcttaatgcttacatgctctgacatataacccactcaaggcaagtaatcagtgggactcacttgtaacttgctatcgtctctaataccgattgatcttgctgcatgaactctaccaaggatgtatcgcctgttcaaatgtgacatcttggactgc

SEQ ID NO: 4846 - DNA, 365 bp, Lilium asiatic
  Clone ID: LIB3230-031-P1-K1-F10
ctgaaacatctcttgctgtaaaggacaaggcccactgaactctcttaacaatttgaggggaacgccatatttttagttggactgaattgtaccatgaaaaccaaacttgggcaagttcttagctgatacattgagatactactactttgatagtcaagcaagctgttggcggtaagtttccgaagggccctttcaagaaagggattaagagggtttcaaaaattctgagaccgaagtgctaaagcagttatcatccatgggccgtctggttgtttgtgctggggacggtgcctgtccagagcttaactaatttggccttattgcggtatggatatctccgtgggtagaattgcccatagacactt

SEQ ID NO: 4847 - DNA, 168 bp, Lilium asiatic
  Clone ID: LIB3230-031-P1-K1-F12
aaaatgagacgcgacctgtcgcggaacattaagcgcgtcgtgcgtggtgagttcacgcagctgaaccgttacacttgactgagccctatcacgagctcctatagattttttcctttcatgctttgccacgtttgccgttctagccggcaaggcctaaagcgaaggctg

SEQ ID NO: 4848 - DNA, 364 bp, Lilium asiatic
  Clone ID: LIB3230-031-P1-K1-F2
ctccgcctcgcgcctccctcctctgtcaaatcatcccctccaagcagatccacacaggcccaaatttcatctatggctctcgcaagcatatacccgattgattcgccctatatgaactgtggaatcgatgcagggcctggtcagttctaacaccttcgaccgccggcgattctcctactggcatactggatggcttcatatctatgacgcgatagtattacgcctaagaattgaactttggatgacaacatctaaggatatgtacgagggcatctagaccgacgaccggatgaggaggaaggattatccgagcgagaggagtgtctaacgatcgacagctttggaacaacattccgtggacacc

SEQ ID NO: 4849 - DNA, 333 bp, Lilium asiatic
  Clone ID: LIB3230-031-P1-K1-F3
ctcctctgagcctccttcttggtctaatcatccctccaggccatgcacccagggcaaaattcactgtggtcacaaagcatattccgattgtttgcgctatataaactgtggaacctatccagggccctgtaagacctaacaccttccaccgccgactattactcctactggcatactacatagcattatatctgatatgggccgctattaccgctcagacttggacttagaatattcttatgccatgatatttacgagtacattcaattccgtcgctgatatgtattggaagcattctgcgagcatgaggagtatctaaccttatgggttcta

SEQ ID NO: 4850 - DNA, 410 bp, Lilium asiatic
  Clone ID: LIB3230-031-P1-K1-F4
ctgaaacatctcttgctgtaaaggacaaggccactgaactctcttacaatttgaaaggaacgtccatatttctagttggactgaattgtaccatgaaaaccaacttgggcaagttcttagctgatacattgagatactactactttgatagtcaagcaagctgttggcggtgagtctccggaaggcccctttcaagaaagggatgaagagggtttcagaaattctgagactgaagtgctaaagcagttatcatccatgggccgtctggttgtttgtgctggggacggtgctgtccagagcttaactaatttggccttattgcggtatggaatctccgtgtgggtagatgtgccgatagactttttagcaaatgagatcctaaagaatgatttagcgtcacctactacgct

SEQ ID NO: 4851 - DNA, 233 bp, Lilium asiatic
  Clone ID: LIB3230-031-P1-K1-F5
ctgaaacttgaccctctgtaattgacattaccaccaaactctgtcacaatttgggaggaacttacttgtttgtaggtggccttgaaagttccaataaatcgaacttgtgcaacttcgtacctgatacattccgatacaagtacctagatggggaagcacgctgttttcccattgttatacagggggcatatgtcattacctgaaaaaggtgagtataaccaatcatacttctg

SEQ ID NO: 4852 - DNA, 80 bp, Lilium asiatic
  Clone ID: LIB3230-031-P1-K1-F6
accgttccttaattactccatcgacccacgcgttcgttgtcgttcgatctaaaggaatcaagctcacattcacattcaat

SEQ ID NO: 4853 - DNA, 398 bp, Lilium asiatic
  Clone ID: LIB3230-031-P1-K1-F8
cctgcatacattgctcctgaagttttactgaagaaggagtatgatggcaagattgctgatgtctggtcttgtggagtgacattatatgtaatgctagtgggtgcatatcccttcgaggatccagaggagcccaaaaacttccggaaaaccatacagcgcatattgggcattcagtattcaattccagattatgttcatatatctcccgagtgtagacaccttatttcgaggatttttgatggcaaccctgcgactaggataacaatgtctgagatacgcaaccatgagtggttcttgaagaaccttcctgctgatctaatggatgacaacatgatgagtaatcagtacgaagaacctgatcaacccatgcaaagcattgacgtgataatgcagattat

SEQ ID NO: 4854 - DNA, 368 bp, Lilium asiatic
  Clone ID: LIB3230-031-P1-K1-F9
cctgcatacattgctcctgaagttttactgaagaaggagtatgatggcaagatggctgatgtctggtcttgtggagtgacattatatgtaatgctagtgggtgcatatcccttcgaggatccagaggagcccaaaatcttccggaaaaccatacagcgcatattgggcatacagtattcaattccagattatgttcatatatcttccgagtgtatacaccttatttcgaggatttttgatggcaaccctgcaactaggataacattgtctgagatacgcaaccatgatcggtttcttgaagaacctacctgctgatctaatggatgacaacatgatgagttaaacatttctaagaacctgttaaccca

SEQ ID NO: 4855 - DNA, 345 bp, Lilium asiatic
  Clone ID: LIB3230-031-P1-K1-G1
cgcagctccaccaccagcgatcggcggccggggcggcgacgcggaggtgcgaaggcgcgtccatggggtccgtcactctcgacctccgtcccggccttggcatcgggcctttcaccctcggtatgcctatacgtgaagcgtttgaacgagttgaacaagatcccaatacctacgacaatgatcatgtaaaatataatgacgaggaccctctgaagctggacattgtaattaactttcctgatcatggattccatctttggtttgatccttgctcacagaggttgcgacttattgaggtttatgatgttaaacagctaaagaatcattgtgcaactttagttgatt

SEQ ID NO: 4856 - DNA, 346 bp, Lilium asiatic
  Clone ID: LIB3230-031-P1-K1-G11
ggagctgccgttccagcgtcttttgagggagatcgcgcaggactggaagacggatctccgcttccagagccacgccgtgctggcgctgcaggaggcgtaccttgtggggctgtccgaagacaccaatctctgcgcaatccacgccaagcggggagcgcgcttagaaggtcatgggtttctctctctgctagttttatgttttaggtcctgtggaactgtgaactgtcttttggatgttaatcttagtgtgtgtttctcaaaccttaacaatgatgttcaaggttcttagatcttgtgtagaacttctgtctgatctagatatttgaagcaatcttttgggtgcttt

SEQ ID NO: 4857 - DNA, 291 bp, Lilium asiatic
  Clone ID: LIB3230-031-P1-K1-G12
cccacgcgtacgagcgacagctgtgtcggtccagactctagtgaggtacatctcccacaatgttgtgacggttacgaagccggacagtcacgccaaggtgaagctactgaaggagaacaaggcatccatgacaaaaaacaccaatctctatgctacttatgccaaaacggtcagcgcggctataacgatattgaaggatctgtctggatcgagcacattcgacagtctgaagaactgtgaacacaatctcaaatgttaactttagggggactttatgaaacctctacaatg

SEQ ID NO: 4858 - DNA, 402 bp, Lilium asiatic
  Clone ID: LIB3230-031-P1-K1-G2
cggacgcgtgggttcatatatccaaagaatgttggaaccagatgggagatgggagctgggagcaacgacaaagaacgcaaacacaaattacgcaaaataaactcttttattcataataatgcattacaccaaacacttgccataataatcatacacacacatcaccatcactcctgagccaaatctgatatggagtccttgccacgtgcctccaccttgaagccaactatctatgtctctgtgtcagggtgaagccttaaacagatttaccatgctctggtcctccatagccgctttccttgtggctccagatcatcatcttcctgaaggtgtcatctaattcttttttagcagttctcgtgacggtgccacttcgaacagatcgctgccctccagactgca

SEQ ID NO: 4859 - DNA, 374 bp, Lilium asiatic
  Clone ID: LIB3230-031-P1-K1-G3
tcgcgcagctccaccaccagcgatcggcggccggggcggcgacgcggaggtgcgaaagcacgtccatggggtccgtcactctctacctccgtgccgggcttggcatctggcctttcaccctcggtatgcctatacgtgaagcggttggacgagttgaacaagatcccaatacctacgacaatgttcatgtaaaatataatgacgaggaccctctgaagctggacattgtaattaactttcctgatcatggtttccatcttcggtttgatccttggtcacagaggttgcgacttattgaggtttatgatgttaaacgtctaaagatgcagtatgcaacttcgttgattggtgggacgtctactctggctactttt

SEQ ID NO: 4860 - DNA, 355 bp, Lilium asiatic
  Clone ID: LIB3230-031-P1-K1-G6
agaagagtacggagctgccgttccagcgtctggtgagggagatcgcgcaggactgcaagacggatctccgcttccagagccacgccgtgctggcgctgcaggaggcgtaccttgtggggctgtccgaagacaccaatctctgcgcaatccacgccaagcggggagcgcgcttagaaggtcatgggtttctctctctgctagttttatgttttaggtcctgtggaactgtgaactgtcttttggatgttaatcttagtgtgtgtttctcaaaccttaacaatgatgttcaaggttcttagatcttgtgtagaacttctgtttgatctagatatttgaagcaatcttttgggtgctt

SEQ ID NO: 4861 - DNA, 138 bp, Lilium asiatic
  Clone ID: LIB3230-031-P1-K1-G7
ttaacactacaacactaaggtattaatttttccatcaaagtcataccttatggcggaatcattaatgtgtatggacatatcaatgctattttccattatttgaattattatatcttggtaccaaattctattcccttt

SEQ ID NO: 4862 - DNA, 399 bp, Lilium asiatic
  Clone ID: LIB3230-031-P1-K1-G9
ctccaacgaagctggtgaagttagataattatgcatagtttgggaggggtgatcaagcagaagtgatggctaggcagtggccaaggttaatggaaagggcatgaagttagcacagtcatgataaagcattggctgaagacaggttctaaagcaagcatgggtgtagctaagaagcatagccaggcatgagacagacatatatagcatgcataggctaaggattgagcagctctccagtatgcaagatagacaatatctcttctgaagcagtgaagcatccatgtagcagtacatctatggtgtaagataattgggtctagttgctgaagacatgcaacattggctctagcagtagtacaacgatggcagagagtagttcaagcatcctctgtacagtct

SEQ ID NO: 4863 - DNA, 347 bp, Lilium asiatic
  Clone ID: LIB3230-031-P1-K1-H1
acaggataaggaggggattcctccggaccagcagagactcatttttgctggcaagcagctggaggatggccgcaccttggccgattataacattcagaaggaatccacgctgcatctggtcctgcgtcttcgcggtgggctgtgagttggtttcgtcctttgttctgtgttactcgtttgatggtggcagttggtttggtatggtgtaggtgtgtcgtgatctagttatcgtgtgtctgtggactgctaggccttgatggcttttatctttactttctctatgccgttctaataaatcgtattaataatcttactaaaaaaaaaaaaaaaaaaaaataaaaacaaaa

SEQ ID NO: 4864 - DNA, 402 bp, Lilium asiatic
  Clone ID: LIB3230-031-P1-K1-H10
cttcctgaacatactgatggataccttcgggaggtttctgatgaaagtactgtcaaggggacaggaaaatacgtgtccctacaccttcgattcgacaaggatatgggtgcacattcggcatgtgattttggcggcggcaaagctgaaaggctggccttggccaaatacaggcaggtgctctggcatggacgggtcttgaactcccagttcaccgatgaggagttacggagccagggtcgatgcccattgacaccagaagaaattggactgttactggcagccctaggattctaccaaaaaactcgcctttaccttgccttccacaaggtctacggacgggaagccagaatcttcagtttgcgcaagctattccctctaatggaggacaagaagagccttgct

SEQ ID NO: 4865 - DNA, 401 bp, Lilium asiatic
  Clone ID: LIB3230-031-P1-K1-H11
cggacgcgtgggcggcgtgcacgctctcctgccatgatggacatgaggccttggaactatggactaagagaaagttcaaatgtgattgctggaattcaaagtttggggacttctattgcaagctttgtcctgataaagaccctgaaaattcagattattcatataatcagaacttcaaaggcacttattgtatatgtggtcttcctaatcctgatccacaggctgaagaaccggtcacaatgatgcactgctgcatatgtgaggactggtttcatgatagtcatattagcgtggatgcttctgatgagatgccaactaatgaataagggtagccactgtgtgatgagcttatctgtcaagactgtgcgctcaagtggtcattcttgaagctttatcctacc

SEQ ID NO: 4866 - DNA, 237 bp, Lilium asiatic
  Clone ID: LIB3230-031-P1-K1-H12
gggtccgccggcgtttacgatccacgctcacgttcgcgtacctccggcactttacctacactatagtggtacgtagagtcagtttactgttctaccttcaacaacgccgctactgctaaagaccctatccctacccatcttatatcgcacttgctaacacgagtagccgccttatgggccatgcctggcggtaagtacgcacataggagagcctcgcgcaacgcagtagccgcctca

SEQ ID NO: 4867 - DNA, 399 bp, Lilium asiatic
  Clone ID: LIB3230-031-P1-K1-H2
agaagtctgattacacgtgagtagttgttatttgattcttgtttttgtttgtggttgagtagattgaaaaaagaggccgacttttatgagtttcggggaagcaagattgggccatttggagcaattaatagacaaaaagaagtagactggtgcttaattttgaagttatcctacatgattacttttgttattgattagttttaagaaatcaatatatttttgtaagtacaatctagttttgagaaattagtatactaattacttcttattagtacagttaattttgagaaattaatatttttttttacgagtggtcaattttgagaaattaatatgttcctcataagtagaattttgggtaatcttgatgacaagatagacaagttgaattaagaactc

SEQ ID NO: 4868 - DNA, 361 bp, Lilium asiatic
  Clone ID: LIB3230-031-P1-K1-H3
atacgtctggtgccaccctcctacgtgtcatcatccactccatgctgatccacggaggctctatttcatatagagcccgccaagcatatcccgattgtttgccctatatcaaccttggaacctatgcagggcactgagagtcctaacacgtgcttaagcctgctggttctcctactggcatacttcattgcttgatatctttgaggcaatcctattaccggtctgagttcgacttaggatgtacatatctaatgacatttacctgatcatttaggccgtcgactgtatgattaggaagtattttgttagcgtgaggagcatctcacgttagaggttcttgatacaacattccttgtacacc

SEQ ID NO: 4869 - DNA, 387 bp, Lilium asiatic
  Clone ID: LIB3230-031-P1-K1-H4
cttcctgaacatactgatggataccttcgggaggtttctgatgaaagtactgtgaaggggacaggaaaatacgtgtccctacaccttcgattcgacaaggatatggctgcacattcggcatgtgattttggcggcggcaaagctgaaaggctggccttggccaaatacaggcaggtgctctggcaaggacgggtcttgaactcccagttcaccgatgaggagttacggagccagggtcgatgcccattgacaccagaagaaattggactgttactggcagccctaggattcgaccaaaaaactcgcctttaccttgcctcccacaaggtctacggaggggaagccagaatctccagtttgcgcaagctattccctctaatggaggac

SEQ ID NO: 4870 - DNA, 413 bp, Lilium asiatic
  unsure (1)..(413): unsure at all n locations
  Clone ID: LIB3230-031-P1-K1-H5
tcccgctccaccgaaccccaccgcccgccccatttcccaatcccccgatcctaagcgccacagagcaatgggcgccggtcgagagatctcgctcgacgaagtccgcgacaagaacgtgatgcaactcaagaagctcaacaccgccctcttccccgtccgttacaacgacaagtactacgctgacgccctcttctccggccacttcaccaagctcgcttattacagcgatatttgcgccggagcgattgcgtgccgactggagaagcagccgtgaggcgctgttcgggcgtacatcatgaccttgggagtcttggccccgtaccgtgggctgggcatcggtacaatgctgttaaatcatgtgttagatctgtcctcgaagcggaacatctncgatatctacttgcacgtgcaga

SEQ ID NO: 4871 - DNA, 285 bp, Lilium asiatic
  Clone ID: LIB3230-031-P1-K1-H6
gccgatgcatacgatccacgcttacgttcgcgtgcctgcggcgcaatacccattctataggggcacgttgaggcaattgactgtccgaccttcaacaacgccgttactgctataagaccctatcgttacccatcttatatcgcactatgctaacacgatgcgcctatgggcgcagcctggcagtaagtacgcacatggagacctcgcgtacgcagtagccgctcactctctccgaaccatggttcgccgctagtccctcgtatatagaggcaagacatagcgtgt

SEQ ID NO: 4872 - DNA, 392 bp, Lilium asiatic
  unsure (1)..(392): unsure at all n locations
  Clone ID: LIB3230-032-P1-K1-A1
ccgaggaaggccaactcctttccttgttgctaaagctcatgaatgcaaagaagacgatggagatcggtgtgttcacgggctattcgctccttacaacggctcttgcattgccagaggacggcaagataactgcgattgattacaatagatcggacttcgaaattgggttgcctatcattcggaaagcgggagtggagaacaagatcaattttattgaatcataagcaatgccagtgcttgataagatgcttcaagaggtgaaggaagatgatctatatgattttgntctacgggatgctgataaaccaaactatggggagttccatgagagattgctgaagcttgtaaaggtcggaggagtcattgacttacgataacaactttttggtttg

SEQ ID NO: 4873 - DNA, 382 bp, Lilium asiatic
  Clone ID: LIB3230-032-P1-K1-A11
gaataaatggcaacagcggaggaaagttgaagggccaaagaaaattgatgaggtgcaccgggatgcggctcaagaaagacatgctcaatcaagtagattggctcgtggtcctgtcattaattcttcgtcgaggcggggaccatctgtcgattatgggcatcgagggcctgccatattgacttctcctagctctcaacagagtggaagcattcgcagtttgccatctcagaatcgtgggtacggtcaagatgttcgattggaagagagacaccagtctgggagcagaaccttggcagtaccacagaggcatgcggatgagtctattacccttggtccccaaggtggtctagccagggggatgtcagttagaggacagcatctg

SEQ ID NO: 4874 - DNA, 256 bp, Lilium asiatic
  Clone ID: LIB3230-032-P1-K1-A12
gaataaatggcaacagcggaggtaagttttagggccaatgaatatatatgtggggcgtcgttatacttcttaagaaatacatacttatatataatatatggacgagttctaattccattctatttatttaaattcgttgaccactactcttacatagaccttattcacaacacatttttattttttttagttgtatacttatatctatttatttaaacctttaccattatcaattgctttatttaaattttaattt

SEQ ID NO: 4875 - DNA, 321 bp, Lilium asiatic
  Clone ID: LIB3230-032-P1-K1-A2
cagtaccgaatcgcgtgtcgagcccgacccacccgtgcgggagggcatctgctaatcttgttgctaaagctcatgaatgcaaagaagaccatggagatcggtgtgttcacgggctattagctccttacaacggctcttgcattgccagaggacggcacgataactgcgattgattacaatagatcggacttcgagattgggttgcctatcattcggaaagcgggagtggagaacaagatcaattttattgaatcagaagcaatgccagttcttgataagatgcttcaagaggtgaaggaagatgatctatatgattttggg

SEQ ID NO: 4876 - DNA, 391 bp, Lilium asiatic
  Clone ID: LIB3230-032-P1-K1-A4
ccctcttcccctctctttcaactaaaatcttcaatggcgcccaaggctgagaagaaaccggtggcggagaagaagccggccgaggaggagaagaagtcggttcctgcagagaagaagcctgctgagaagaagcccaaggcagggaagaaggtcccgacctccaaggagggggcctctgacaagaagaagaagaggtcgaagaagtcagtggagacctacaagatctacatcttcaaggtgctgaagcaggtccatccggacatcggaatctccagcaaggccatggggatcatgaacagcttcatcaatgatctctttgagaagatggcacagggagtccgccgcctcgcccgctacaacaggaagaacaccatcacctcccgggagattc

SEQ ID NO: 4877 - DNA, 381 bp, Lilium asiatic
  Clone ID: LIB3230-032-P1-K1-A5
gtttgctaacaggtacctgacggagttcaagacgggagctggcatgacggaggcggctaagagtacgcttttagtgtataaatcagctaaggatattgcgttggcagatctggctccgactcatccaattaggcttggattagcgcttaacttctcggtgttctattatgggatctagaactcgtcgtatcgcacttgtaacccagcaaaacatgaatatattcaagatggaattgaccggataaaagttgactttgaggacaaccaagactgcttaaatcttttgtaaaaaggtggcttgatgaaagggaccttcttcggtttggaaatctctttttggctgagatgtactgctaggggagcctttttaacaacgtggta

SEQ ID NO: 4878 - DNA, 402 bp, Lilium asiatic
  Clone ID: LIB3230-032-P1-K1-A6
cggacgcgtgggcaaatttgtcgtgtctacatcagtctcattctgcatcaatatatataccatactggaggctttcaaagatcttcaccgatgtttaaatttgggagagctcgaatcccttgctactggtttaagttcgatggccgtagcttttacagtgacctgatccagaacaccttcctaaattttttagttgcaaacctgaaacgatttagcaaaacctttaccatcgacaatagcttgagttaaatttgatttacatagtttttttctctagggtcatgtttggtgccgtgatttcatacccggccttctgataaatgacttctgaggcacctagttgtcgccccatgtctgagtattcggctgtgggaaacctattttctttatccgtattaaaaa

SEQ ID NO: 4879 - DNA, 330 bp, Lilium asiatic
  Clone ID: LIB3230-032-P1-K1-A7
cggacgcgtgggcaaacttgtcgtgtctacatcagtctcattctgcatcggggtatgataccatactggaggctttcaaagatcttcaccgatgtttaaatttgggagagctcgaatcccttgctactggtttaagttcgatggccgtagcttttacagtgacctggtccagaacacctagctaaatgttttagttgcaaacctgaaacgaactagcaaaacctttaccatcgacaatagcttgagttaaatgcgattgacatagatcttttctctagggtcatgtttggtgccgtgatttcataccctgccttctgataaatgacattt

SEQ ID NO: 4880 - DNA, 409 bp, Lilium asiatic
  Clone ID: LIB3230-032-P1-K1-B1
cggacgcgtgggatttagatttcgttactatcggttcgtcggagcagtcggttttcgatcttactagtggttcaggtatcggtcgttttccaggaactcttggccgtcctcctttttgcagccttactcttttattgggaggcttgcgtcagtttttatagcttccattgaatggtaagctttcatctcctttggccttggttcttgagttcacattgatccccctgatttctggtggtcttcctttctgctgtgtgttgggtgcgatgtatgtctagtgagtcttttcaaattggttcctggtcgagtgtgctggagcagcaccttctgtttgctgatcttgttttcgcctcaagcctcttgtggtagtcatcgtcgtcctatgtctagtaggtctgtgtgtgtcggt

SEQ ID NO: 4881 - DNA, 410 bp, Lilium asiatic
  Clone ID: LIB3230-032-P1-K1-B10
agtccactcaatttcttcaggatatggctaggaagtatagcatggtgatagtaaacccaatccttgaaagggatgtaaatcatggagagactatttggaatactgttgtcgtaattggaaaccatggcaatataattgggaagcatcgaaagaatcatattcctagggttggagatttcaatgagagcacttactatatggaaggaaacacaggtcatcccgtgtttgaaactacgtatgggaagattgcagtaaacatctgttatggaaggcaccatcctttaaattggctagcctttggtctcaatggagcggaaattgtcttcaacccttctgctactgttggtgaactgagtgaacccatgtggcctattgaggctcgcaatgcggctatagcaaacaatttcttt

SEQ ID NO: 4882 - DNA, 397 bp, Lilium asiatic
  Clone ID: LIB3230-032-P1-K1-B2
ccgaggaaggccaactcctttccttgttgctaaagctcatgaatgcaaagaagaccatggagatcggtgtgttcacgggctattcgctccttacaacggctcttgcattgccagaggacggcaagataactgcgattgattacaatagatcggacttcgagattgggttgcctatcattcggaaagcgggagtggagaacaagatcaattttattgaatcagaagcaatgccagttcttgataagatgcttcaagaggtgaaggaagatgatctatatgattttgtgctagtggatgctgataaaccaaactatggcaagtaccatgagagattgctgaagcttgtcaaggtcggaggagtcatcgcctacgataacactctctggtttggtagtct

SEQ ID NO: 4883 - DNA, 296 bp, Lilium asiatic
  Clone ID: LIB3230-032-P1-K1-B3
gctccagggtggcgatttcactcttggtgacgtaaggggaggagagtcgatatacggtaccaaatttgaggacgagaacttcaagctcaagcacacagggccaggatttctctcgatggcaaacgctggtcgagataccaatggttcacagtttttcatcaccacagtaaccactagctggctggacggcaaacacgtggtatttggaaaggtgatatctggaatggatgtagtttataaggtagaagccgaggggcgacagagcggatcatctataagcaaggtcatcattgccg

SEQ ID NO: 4884 - DNA, 415 bp, Lilium asiatic
  unsure (1)..(415): unsure at all n locations
  Clone ID: LIB3230-032-P1-K1-B4
tgtgaatctagaagtcgaaggtctgagaggaaagttgaaagacttagaaaactctttgcagtctctctatactgaaaaggagaaccttacttccgagagaaacactctggtttcccaggtagagactttaactcaaaattcggagtatcttacggaagaaaatgctttcttggtgaactctttatctcttgtgaatctagaagtcgaaggtctgagagtaaagttgaaagactatgaaaactctttgcagtctctctataataaaaaggagaaccttacttccgagagaaacactcttgtttcccaggtagagactttaactcaaaattcggagaatcttacggaagaaaatgctttcttggtgaactctntatctcttgtgaatctagaagtcgaaggtctgagagaaaagttg

SEQ ID NO: 4885 - DNA, 160 bp, Lilium asiatic
  Clone ID: LIB3230-032-P1-K1-B5
ctcaatctgtctgcacgaacaggaatgcatacgctctatagatttgacggcagacgaactggacagcatgcgaacatggacactgattctatcaagacgacacacgactcgataatgatacaaagcgacctttacggtgccccatgaaaatgctagacca

SEQ ID NO: 4886 - DNA, 143 bp, Lilium asiatic
  Clone ID: LIB3230-032-P1-K1-B7
ggctaaattaaactacttaggtcatactgaaagaaactcttatttaaagggcggggattttaaaacaaattctactactataaatcttacttgaatgagtattttgacaggacactctttaatagaaaaacacaaatactatt

SEQ ID NO: 4887 - DNA, 395 bp, Lilium asiatic
  Clone ID: LIB3230-032-P1-K1-B8
cattcactggcagtgtctcaatccgaggccgaattcttgccggcacctgccacagtgctaagatgaaccgaaccatcattgttaggcggaattacctccactatgttaagaagtatcagaggtatgagaagcgacattccaatattcctgcccattgttccccctgtttccgtgtgaaggaaggagatcatgtcatcataggccaatgcaggcctttggcaaagactgttcgttttaatgtgttgaaggttgttcccgctggatcaaccggtggaggcaagaaggcttttaccgcagtttaagttgctctaagtggtggtttcaaaagttatccgaacattatagtggattttgatttggtggttagtattatgtaatcattttgttttggtact

SEQ ID NO: 4888 - DNA, 388 bp, Lilium asiatic
  Clone ID: LIB3230-032-P1-K1-B9
cattcactggcagtgtctcaatccgtgtccgaattcttgccggcacctgccacagtgctaagatgaaccgaaccatcattgttaggcggaattacctacactatgttaagaagtatcagaggtatgagaagcgacattccaatattcctgcccattggtccccctgtttccgtgtgaaggaaggagatcatgtcatcataggccaatgcaggcctttggcaaagactgttcgttttaatgtgttgaaggttgttcccgctggatcaaccggtggaggcaagaaggcttttaccgcagtttaagttgctctaagtggtggtttcaaaagttatccgaacattatagtggattttgatttggtggttagtattatgtaatcatttttgtt

SEQ ID NO: 4889 - DNA, 128 bp, Lilium asiatic
  Clone ID: LIB3230-032-P1-K1-C11
cggggcgacccacacgaccgagaaaacaaaaagaaaaaaaaacaaaaaaaaaaaaaaagacaaaaaaaggggggggggaaaaaagaagcgaacaaaagaaaacaaaaaaaagaaaaaaaaaaaggaaa

SEQ ID NO: 4890 - DNA, 410 bp, Lilium asiatic
  Clone ID: LIB3230-032-P1-K1-C12
ctgatcccgtagaccgtgagaaaacttgccctcttttgcttcgggttttcaccaagactggtggccaccactcggacgaagaatttgctacgagaggaaaggagcccaaagatgaagtccagatatatacatggaaggatgctacacttcgagaactaactgacctggtcaaagaggttgctcttgcagcgaggaaaagagatgcgaagctgtcatttgcatttgtgtatcctgacaagcgtggtcgttatgtcgtgaggccggttggcatggcattttcgtatggaaataatcggcgattggatgatgcaaagacattacaagatctcaactttcaagttggagattacttgagtgttgctatcatttagagggattagctgcgataccggtgggaagctggactgatg

SEQ ID NO: 4891 - DNA, 416 bp, Lilium asiatic
  Clone ID: LIB3230-032-P1-K1-C3
cggacgcgtgggtccagttccctgttggccggatcgcgcgcttactcaaggccggcaagtacgcggagcgggtgggcgccggggctccggtgtaccttgcggccgttttggagtacctcgcggctgaggtgctggagctggccgggaatgcagcgcgggacaacaagaagactcggatcgtgccgaggcatgtgcagctggctgttcggaatgatgaggagctgatgaagctgttggggaaagttaccattgccagcggtggcgtgctccccaatatcaacaatctactgctgccgaagaagtctgccaagtctgctgtggtcgctgacgatgacaattgagccgtactgagtgttggttgattgctgagagaagttatgtttggattttgctggattttcttggcttcatgtgaa

SEQ ID NO: 4892 - DNA, 395 bp, Lilium asiatic
  Clone ID: LIB3230-032-P1-K1-C4
gtgcggaagcatgagtggtcgcatttccgcgaaggtgtaacattagaggggaactcttcaccaaatggaacacttgttgatgttggattgagtaagagtgttgtcgttgaacaagtccttgaacctggactgagggtgaccgtggccatggggagtgatcgtaacctagatacagattgtttaagaaaggttgttaagcggtgtagtcctagagaagaaaagggattatactggggatatacagtccgatatgcatcaaatttaagtcgtgctcttaagagttgcccatacaagagtggatatgatcatgtcattggaacttcagagcatggtcttgtggttaattcatcagatcttgttttacctacatttaggcaccttctaattacctttgg

SEQ ID NO: 4893 - DNA, 185 bp, Lilium asiatic
  Clone ID: LIB3230-032-P1-K1-C5
gtgcgaaagcataaatggacgtatttgcgctaaggtgtaagattagaagaaatctgtggaccaaatggatcacgagaaggtgaagcatagtgtcacagggttcactttggacaagtagcgtgaacactggactgagaaacgaccgaggacatggcgagtgataataccctatatacaaactgttt

SEQ ID NO: 4894 - DNA, 414 bp, Lilium asiatic
  Clone ID: LIB3230-032-P1-K1-C6
gtagcggtgaggcaagtaagactaggcagaaaattactaaagttaacaagtcttccactccgaaaactcctacggaattgcgtcaaaagaatgagactgatgaagattacagtccatctccagtggaaacacaaagcgtggttaccaatggcttggaagcaggtaaacccggcccgaagaggaaaaaggaggcgacaactactaatgagggaccagcagctcttctgttgacatttgctcctgggataacactgccttccaaagagaacctcgtctctacgtttaggaaatatggtgatctgattgagtctgaaactgattcagtgcaaaaatctggctgtgctcgtgttgtgtttgtgaaaagcattgatgcggagaaggcctttaatagtcgaaataagaccaaagaatttg

SEQ ID NO: 4895 - DNA, 412 bp, Lilium asiatic
  Clone ID: LIB3230-032-P1-K1-C7
gggattttggaaggtcgtaacgggataaaggagactagccttcagcacgcagctaggtaccttgcaaaccaggaatgggttagaaatgattccctcaaaatcatagaaaacacagctatacctgtcattatgcttctggttgaagttccacacgaccttaaatttaaaaacggaagtttgcccattgtggatgcaccacaatcacaaccaaccaaggttgctgaagagcaagttagtgcctcttattctgatctcttgtgttctgagaattcccctttgccgatgtacccagagataggaaaggattgtgcccctgatgtgaagtaccttgaagcaaagtcagttcgtcttgatatcagtttcaagtcaccatcacacacagggctccagacatcagaattggtcagagagc

SEQ ID NO: 4896 - DNA, 341 bp, Lilium asiatic
  Clone ID: LIB3230-032-P1-K1-C8
gggatattggaaggtcgtaactctataaaggaaactggaagacataacgcagttgggtacctatcaaactaataatggggtaaaaattatttcctcaagattatctataacacagctatacctgtcattatgctaatggttgaagtaccacacgaccttaaattcaataacggcagattgtctattgggggtgcaccacaatcacaaccatccaatgttgatgaagagcgactttgaacctcttatactgatctcttgtaataaaagaatttcccttacttgatgtacacacagataggtaaggaatgttcccacgttatcaaaaaacttggagcattgtt

SEQ ID NO: 4897 - DNA, 343 bp, Lilium asiatic
  Clone ID: LIB3230-032-P1-K1-C9
gatacactggcagggtgtaaatccgtggacgaatttttgccggtacatgccacagggctactatgaaccgaaccatgattgataggcgaaattacctacactatgttaagaagaattatacgtgtcagaagcgacattccagtattcctagcacattgttaaatgtgataacgggtgaatgacgatgatgattgcatcataagcccatgcaagccttggtcaaagactgctcgtttgaatgtgttatacggtgctcttgctgtatcaacacggccgtgaaacgaggcttttacagcagtgtaagttacgctcacgtcgtgtttcaaaagttatacgaacatta

SEQ ID NO: 4898 - DNA, 365 bp, Lilium asiatic
  Clone ID: LIB3230-032-P1-K1-D1
gaaagagtcaaccttggctgagctgttccgtgagaggaagaggatgagtgctggtactggatctattgatcggacaaagagggcgaggaagcttggagacgtgtttgatcggattgctgctgcaaaggacactgagacggtgagcacaatctcgacccggacacggaacaggagtcctattgtgattgagactgatggcttgcctgcaaaggaagcttcagcttctcgtcgggcatctctgaggaagaagtctgtttagagacattgtactttgctttgtttgttagcttcaatctttagttttgggttaaatgtctgagactcttggtgatagaataattaattgtagacttactttgcaaaat

SEQ ID NO: 4899 - DNA, 144 bp, Lilium asiatic
  Clone ID: LIB3230-032-P1-K1-D10
aaccacactaaatttcttaggtcttacttgaggaaacccttttgaatagggcgggggagtttaaacaattctaactactatcatttgcccttgaatgtttagtttgatagctttaattctggactgttaaacacaactactatt

SEQ ID NO: 4900 - DNA, 360 bp, Lilium asiatic
  Clone ID: LIB3230-032-P1-K1-D11
cccacccctacatcccgcagtgcttatttgatgaccctcttctccaacggccgcgccgtcttatacaactattactactccatatcgaccaaataactatccatgaacagaatcctaacgcatccacattcacaaactctcattttacacacacaataatccttctaatcctgcacgactgctatttcaagcgacctaattaaggactcaatatagcatcgaatattttgaaccatcaaatctaggatttttttgttacgtcgctctattctgatcccaatgaaatatcttctccatatttctttacttgccatgcttaaaaatcttccttatgccttttttactattaaaacaatcatc

SEQ ID NO: 4901 - DNA, 239 bp, Lilium asiatic
  Clone ID: LIB3230-032-P1-K1-D12
cccacgcgtccagcctgcattgcttaatctaggaccatcaaagacaccggggcggggtctaataggacgattagcaatccattgcgaaaaaatgactaccgctgacgtcaatacaatggcgtaccccctgactgtctgttatctcacaaacacaataattgttcttatccatcaattggtcaattacaagcatattgagaaaggtgcaaagtaactaacaaaaactttaaacaggcaaa

SEQ ID NO: 4902 - DNA, 358 bp, Lilium asiatic
  Clone ID: LIB3230-032-P1-K1-D2
cgacaagccgaagccgacgccggaggccgccaccgcggcgaactacgcgtcgttgtggtcgcccaagcgcctcatgcagcgcgctgcccgcgctttccgccgcagcaggtcgcgcgcccgcgtcaggacggtcaaggacctcgccgaggaacgggcctcagtgctcgccgccagcagcaaggtctctgatgaggcggcggcggcggctaccgcggtgccgcctgcaggtgccaagacctccagcagcaacgatgcccgcgacggcgccatgggcagcgtgcaagacgagccgcggcagcagcgccacgatgactatcaccccgagatcgtccccgagaagatcatacacgaggacgcg

SEQ ID NO: 4903 - DNA, 321 bp, Lilium asiatic
  Clone ID: LIB3230-032-P1-K1-D3
cgacaagccgaagccgacgccggaggccgccaccgcggcgaactacacgtcgttgcgggggcacaagcacctcatgcaactcgtctccatcggccttgcgccggagcaggtcgcacgcccgtgtcaggaccgtcaaggacctcgccgaggaacggacctaaaagctaacaattatagtacgattgatatgcagagagagccaatttacgactcaacattgcatggaaggaaggggtgcatcaagctatgtgtagcccgagacgttaccttcatctgtatgaaattttatttgaatcggcacattgtggttgtctatgctta

SEQ ID NO: 4904 - DNA, 418 bp, Lilium asiatic
  Clone ID: LIB3230-032-P1-K1-D4
aggagtgctagctcactagcaattgttgtcaatggtgccattgtcggagaagaagtggtagatatagaaagtggaaatgaaatcatctctgggcctgatagagaaggctacttaggttatacttttgaattagtacccattcaggaacaggaccaaacaaatgtgaagatctcttttaatgttgagcatgcaaagtgtggcatttgcttgaacatatggcatgacgttgtcactgttgctccttgtctccacaatttctgcaacggttgcttctcagagtggttacgaagatcttcaagccggtctagggatagagatcaaagtgttgcctgtcctcaatgtcgagcgactttgcattctgctggaagaaaccattttttgcataacatcgaagaggctatcctgcaagcattttctt

SEQ ID NO: 4905 - DNA, 162 bp, Lilium asiatic
  Clone ID: LIB3230-032-P1-K1-D5
aggcagtgctagctcactagcaattttgtcaattgtgccacaatcaaagaagacgcggggatatagaaagtgttattgaaatcatctcctagacctaatatagaaggctacttaggttatactctttgaatctaaacctcattatgaacatgaccaaacaaa

SEQ ID NO: 4906 - DNA, 419 bp, Lilium asiatic
  unsure (1)..(419): unsure at all n locations
  Clone ID: LIB3230-032-P1-K1-D6
cggacgcgtgggttctatcctgccttttgtgctttcaggagatcaaaaagtctctaagaaagatgcaaaagttagtagtagacttccttgtggtagtatcgctaagccaatcaacatcagaataggcacgaagctcaaattgtgatctaacatagaaaaataaggagtgattgtgcctgaattcggagaagagcaatatagtgatcaatgtgcagtgtcacaacgaacagactcacaactccaattgcatgggagatgtccgacctggtgatgcaaaggtagccgagttgaccacctangtgtctgtagcgagtaggatcaacaagaagcttaccatcagttggtctcaacttcacattctgttgtagaggagtgtccacgctcttctcattagagaggtcggcatgatctaagattca

SEQ ID NO: 4907 - DNA, 316 bp, Lilium asiatic
  Clone ID: LIB3230-032-P1-K1-D7
gggacgcagcgggactgtactcattttcgcgaaggtgtaacattaaaagggatctcttaacgaaatggaagactggaggatgttggattgaggaagaatgtttaagttaatcaacatcttaatcgggaactgactgagatcgggatctatcatgagagaatatggactaattgcagattggttaagagaggaggataatcggtatcaatgtacagaagaaaagggaacagactgtggatatacattgcaatgtacatgaaatataaggcgatctcttaagagttgaacataccacattggatttgatcatgagatt

SEQ ID NO: 4908 - DNA, 393 bp, Lilium asiatic
  Clone ID: LIB3230-032-P1-K1-D8
tgcccctctcgaaaccctaaccctaagagatgaagggcgcgaaatcgaagaccgacaccgctaaggtcaccaagaaggccgaagccaaggtggcaccgaagaggaaggcggcggagaagccgagcaaggcggccaagccggcgaagaaggggaaggccggcgttgaccccaacaaacccaagcgccccgccagtgccttcttcgtgttcatggaggagttcaggaaggagttcaaggagaagaaccccaacaacaaggctgtctctgctgtgagcaaggctgggggagacaagtggaaatcaatgtctgatgctgataaggcaccctatcaagctaaggccaacaagcgtaagactgagtacaccaagaacatggacgcctacaacaagaaac

SEQ ID NO: 4909 - DNA, 317 bp, Lilium asiatic
  Clone ID: LIB3230-032-P1-K1-D9
gagcacactaaatatcttaggtcctactggaggaaacccttttgggtaggtcggggaattaaaaacaaattcaactactatcgattgcccttgaatgtatagtttgacagggctcttctggattgagaaacacacgtactattgatgacgacttcaaatcctacaatgattggactattgatatggtgagagagccaatttacgactcaacattgcgtgtaaggaaggggtgcatcaagccatggattgttatttcccctcgctctcattggatgtaaatgttataggtatagatacgttgtgggtgtgtatgctta

SEQ ID NO: 4910 - DNA, 420 bp, Lilium asiatic
  Clone ID: LIB3230-032-P1-K1-E1
cacaaacttcatccccacacattcactgctgcttagatctgaaattctcggacgcttccccctcccgtcttctctctccccgttgtgattcaatggctacagttgaggttcaatctgccacatctgtcgtgcctacaacagaggtccaacaagaagtgacaaaagatgtacgagccgagaaagcaacggaagaaacatcagtaaagaagccaaaggaggaagtaacaataacaatcgaagctccaactgaacatgtgaaagaaactgagatcaccaaagaggaagaagcaagtgaagtggtagaagttcaaggaaccgaagccctgaaagaggaggaatcaacagaagaggaagcaaatgtagatgaactagttgtagaagcaacacctgagaagatagatgatgttgaagatgttacta

SEQ ID NO: 4911 - DNA, 414 bp, Lilium asiatic
  Clone ID: LIB3230-032-P1-K1-E11
cccacgcgtccggccggcagtgctgaagcgaggaccgtcgtcgccgccgccgccgccgccgcatcggacgatcagcgatccatcgcgaagaaatgactaccgatgaggtgaatccgaaggcgtaccccttggcggactctcagctgacaatcacaatcatggatctcatccagcaggcggccaattacaagcagctgaagaaaggagcaaatgaagcaacgaagactctgaacagggggatctcggagtttgttgtgatggcggctgatactgagccgcttgaaatccttctccatctccctctacttgccgaggataagaatgtgccttatgtcttcgttccatcaaaacaagctcttggtcgggcttgtggagtgacaaggcccgtgattgcttgttcagtaactagcaatg

SEQ ID NO: 4912 - DNA, 415 bp, Lilium asiatic
  Clone ID: LIB3230-032-P1-K1-E12
cacctccattcgaagcaaatcagcgatgtcgggtcgaggaaagggcggaaaggggctgggcaagggaggcgccaagcgccaccgcaaggtcctccgggacaacatccagggaatcaccaagccggcgatccggcgtctcgcccgccgcggcggtgtgaagaggatcagtggcctcatatacgaggagacccgtggggtgctgaagatctttctggagaatgtcattcgcgatgccgtgacctacaccgagcacgcccgccgcaagacggtgacggcgatggatgtggtgtatgcgctgaagaggcaggggaggacgctgtacggcttcggcggctgatggatttggttttctgcaggcttttgtggtgctggtgtctggtgtctatttccttttgttgttgttgaatgttaatgc

SEQ ID NO: 4913 - DNA, 386 bp, Lilium asiatic
  Clone ID: LIB3230-032-P1-K1-E4
aggagtgctagctcactagcaattgttgtcaatggtgccattgtcggagaagaagtggtggatatagaaagtggaaatgaaatcatctctgggcctgatagagaaggctacttatgttatacttttgaattagtacccattcacgaacaggaccaaacaaatgtgaagatctcttttaatgttgagcatgcaaagtgtggcatttgctggaacatatggcatgacgttgtcactggtgctacttgtctacacaattgctgcaacggctgcttatcatagtggttacaaagatctttaagccggtctaaggatatgagatcaaagtgttgcctgtccttaatgtctagcgactttgcattctgctggaagaaaacattttttgcata

SEQ ID NO: 4914 - DNA, 418 bp, Lilium asiatic
  Clone ID: LIB3230-032-P1-K1-E5
aggagtgctagctcactagcaattgttgtcaatggtgccattgtcggagaagaagtgggagatatagaaagtggaaatgaaatcatctctgggcctgatagagaaggctacttaggttatacttttgaattagtacccattcaggaacaggaccaaacaaatgtgaagatctcttttaatgttgagcatgcaaagtgtggcatttgcttgaacatatggcatgacgttgtcactgttgctccttgtctccacaatttctgcaacggttgcttctcagagtggttacgaagatcttcaagccggtctagggatagagatcaaagtgttgcctgtcctcaatgtcgagcgactttgcattctgcttggagaaaccattttttgcataacatcgaagaggctatcctgcaagcattttctt

SEQ ID NO: 4915 - DNA, 216 bp, Lilium asiatic
  Clone ID: LIB3230-032-P1-K1-E6
aggactcctagctcatttccaatttttgtaaatggtaccatatcaaaaaaacactcggggggaatcgaaagtgttaatgaaattatctcttggccttatagataaggctaccaacattatacttttgaattagctcccattcaggtccatcaccaaacaaatgtgaagatctcttctaatgttcagcatgcaacagtttccatttccttgtacata

SEQ ID NO: 4916 - DNA, 257 bp, Lilium asiatic
  Clone ID: LIB3230-032-P1-K1-E7
aggagggctcgctaattatcacattttctcaatggtgccacattcgaaggggacgcgttaccaattggaagactagatgatattatatttggtcctaatatagaaggctaccaaggtcatacacctgaactagtacccattcgggaacaggaccagacaacattgactatctacttttttgttaagcatgcattgtgagccatttccttctacatatgaaatgacattatacactggttctacttgactccacaaca

SEQ ID NO: 4917 - DNA, 384 bp, Lilium asiatic
  Clone ID: LIB3230-032-P1-K1-E8
gcgggaagcaccgcggattcagttggagagaacagtagtgatccatgtagtacaccatcggagccggttgccccggagactgttgggacgacagctgtagtagctgttatcagttcttcgcacatcattgttgctaattgtggggattcgagagcggtcctatgccgtggaaaacaagcagtgcctttatcggtggatcataaaccaaatagagaggatgaatatgcacggattgaagcagaggggggcagagtcatccagtggaatggataccgtgtgttcggtgttctggcaatgtcaaggtcgattggggatagatatctgaaaccatggattatcccagtcccagaagtcaaaattgttccccgaatgaaagaagacgaa

SEQ ID NO: 4918 - DNA, 413 bp, Lilium asiatic
  Clone ID: LIB3230-032-P1-K1-F10
cggacgcgtgggctaatccgcccctgccgttgcgtgcccgccgtcggagccgtgcccttgaagcgatcgccgattttctgtcatctcgcgtggaatttatggcgtttcttgccgctgtctttgtcgatggaggggagtgatagagagggccgcgagcacgggggctccagcgagagcctgccgccgaaccccctcaccggagcttaccgccagtgctttggcctcccgccggctgcctcgccctgcaagcgcacactcgttcgtcacgcctcgttggtgaagacaaagatgcccgatgtttctccggtgtatgaaaagattagggaacacagtgggactgagttcgtcccagttgtacgatctggaagttgtgctgatattggatttcgacaaagcatggaggatgcatatgt

SEQ ID NO: 4919 - DNA, 383 bp, Lilium asiatic
  Clone ID: LIB3230-032-P1-K1-F3
gcggtggggtggctcctctgatgatgagaatataggcgaggactcaccaagcactatgttttcgccaatgtcttatggctatggagctccattgaccatggaagatagggagagatcttccgtaaactctaggtattgtttggttgcaagcaagcaaatggtcgggatatttctcacggtttgggtgaggagtgatacgagagattacgtgaagaacatcaaggtttcatgtgttggcaggggattgatgggttatctcggaaacaaaggttcgatttcggtcagcatgtccttgcatcaaacaagcttctgcttcatatgtagtcatttgacctcgggtgaggagggaggtgatgaactaaagaggaactctgatgtcatgg

SEQ ID NO: 4920 - DNA, 401 bp, Lilium asiatic
  Clone ID: LIB3230-032-P1-K1-F4
agacgatccttgtccagctaaggaagcttactgcagctggtaagctcaccaaggtgaagtactcctacaagttatctgctaaaccaactgcagtcaagaaacctgctgctgccaagccgaaagcgaagaaagcggcagtgaagccaaagcccaaaacagctgctgccaagcccaaggctaaatctgctgctgtgaagaaagccaagcctaccgccccaaagccgaagactgctgccaagtcgaaagcttctgcatcgaaacctaaagctgttggacgtccagcaaagactgttgccaagtcgaaggctgttggacgtccagcaaagactgctgccaagtcgaaggcttctacaacgaaactgaaggctgttggacgtccagcaaaaactgttaccaagtcg

SEQ ID NO: 4921 - DNA, 121 bp, Lilium asiatic
  Clone ID: LIB3230-032-P1-K1-F5
aggcgagctaggtcaatatcaagaggcgtacttggtgtcattagctcacaagaggggggtgctattacaagtgaacttgtaatcatatttgggcctgataaacaatggttctcaagttata

SEQ ID NO: 4922 - DNA, 396 bp, Lilium asiatic
  Clone ID: LIB3230-032-P1-K1-F6
gagtcccgcccacaaacccccatcaggagaaacactagcgccgccccctccgccaccgctgcccctcgccggcggccatcccccatcaccgcccgctcaggtgctgaaggaactaacatggccacacctacagatcaagccaagaaagaatatgcagaatttactgaaaaggtgaagagaactgtttttattgacaacctgtctcctgcagttacggaagcagtcatcaaaactgctcttgggcaattcggaaatgtgaaaaatgtagagttcataccgaactacacaataccttataatatcccccattctgcattggtggaaatggagaatcccaggcaggcaaccaatatagtcagtgatatggcgaactatcctttcatgatgtctggcatg

SEQ ID NO: 4923 - DNA, 400 bp, Lilium asiatic
  Clone ID: LIB3230-032-P1-K1-F7
cctttcacccatcaccaaaataaaaatctcattcatgtgagagcagctcaggaggacggaaccagagatggagatccccagagtgaagttgggaacccaaggcctcgaagtctccaagcttggcttcggctgcatgggtctcacaggcggctacacctctcccctctccgacgtagccggcgtctccatcatcaccgacgccttcaacaagggcatcaccttcttcgacaccgccgacgtctatggcccccacaaaaacgagatactcgtcggcaaggcattgaagcaattgccgcgagagagggtacagctggccacgaagtttggcgtcctgggtttcggcgccgccggtatggaagtgagtggcaagccggagtacgtgcgggcgtgctgtgaaacg

SEQ ID NO: 4924 - DNA, 378 bp, Lilium asiatic
  Clone ID: LIB3230-032-P1-K1-F8
cggacgcgtgggcggacgcgtggggtcttggtgataaaaaaccaaatgagtgtcaagtgcagcatagaaaatttctatgagaaaaagaactcttttgaaaaagccaggtgattgacatattggtccaacaaaaatgggaaaacacgttagaaggtaagaaaccaaaagggggaggatgtagtgaagtggaaaaggtacaattgatttatacattagagagaaccaatagtttatattgagttacctaatcaagcgctttatttgcaggaggaggagatatctattgcagattccatcaaagaagaagaatcaatttttgctgtcaaaagaaggagcaacactacagtcacgcttgatagtctccaggaagagcacccc

SEQ ID NO: 4925 - DNA, 361 bp, Lilium asiatic
  Clone ID: LIB3230-032-P1-K1-F9
cggacgcgtgggcggacgcgtggggtcttggtgataaaaaaccaaatgagggtggggggcagcatagaaaatttctatgagaaaaagaactcttttgaaaaagccaggtgattgacatattggtccaacaaaaatgggaaaacacgttagaaggtaagaaaccaaaagggggaggatgtagtgaagtggaaaaggtacaattgatttatacattagagagaaccaatagtttatattgagttacctaatcaagcgctttatttgcaggaggaggagatatttattgcagattcccgtgaaagaagaagaatcaatttttgctgtcaatagaatgagcatcacttcagcaacgcttgatagt

SEQ ID NO: 4926 - DNA, 303 bp, Lilium asiatic
  Clone ID: LIB3230-032-P1-K1-G10
gccgagagcccagcgacacaaaattcttcaggaaagaagggcaagaaacagaccagagttctgctatcgacagctggtgggcgtcggtattagatatgagccaaaggctgtgtatatacttgacctctccttctcatggtgtaagattaacttgtaagtttggttagctctacaataaagaatcagttgggatgcaacatactgtaactggttggtcttttgttgctttttaaattaaaagagcacatttgatttgtataaatgaatttgtatttgtccgcttaagtgaaacaaagagttttg

SEQ ID NO: 4927 - DNA, 387 bp, Lilium asiatic
  Clone ID: LIB3230-032-P1-K1-G11
gcccaacaatccaatttcaacgagatgttattcaaaaatttgaatcacaatcaaaggtaaaattcacaccattcttgtccacattcttttccattatcatttactcgagagtacaactcaaatacttaccacaaatctctatggatagagagagaaacaataccacacatgagcttgatccttgttagtagaccgggccacaagctctagctcaatgacgaactacatcgttggggataatatatcccttcttactcttcttgttagctccttttctcatctcctccacctctttcaccccctattatatatagaacaaaataaaaccctagaagatccaaaatttggcccactagacaatttgaaagataacatataatataaaat

SEQ ID NO: 4928 - DNA, 419 bp, Lilium asiatic
  Clone ID: LIB3230-032-P1-K1-G12
gctgaggatgtccaggggaagaatgttcttaccaacttttggggtatgaatttcactactgacaaggtgaggtctttggtccgtaagtggcaaactctcattgaggctcatgtggatgtgaagactacagataactacactctccgcatgttctgtattggattcaccaagagacgtcctaatcaagttaagcggacttgctatgcgcagtccaaccaaattagacaaattcgccggaagatgactgagatcatgataaaccaggcgacttcttgtgatctgaaagagttggttcaaaagttcattcctgaaatgatcgggaaagagattgagaagcagacccatggcatttatcctctgcagaatgtcttcatcaagaaaagcaaaattctgaacggccctaaagttgatcttggaaa

SEQ ID NO: 4929 - DNA, 390 bp, Lilium asiatic
  Clone ID: LIB3230-032-P1-K1-G2
caaactgaaaaggaagggccatcactacttcatttgtggcattcccggtcattgcagcctaggacagaaggttgacatcagaattcccaagctcgtggcatcttcggcttcatcacccttgccatcgacgtctccatctacttctcctgcgcccgtccacccaggaagcaatgcctcgggcaatcacaacggtgttgtctggacatttgctgtggttggttttgctgcatttgctggtctgataatggtgtagatctcggagtggcacaagtttatttaagttcgtaggattatctatgaaagtttttctgaatgttggtgaagcaatcgatgaatttttgttcttttgttatttgaatggttagttaaggaggtgaagtttttataaaa

SEQ ID NO: 4930 - DNA, 412 bp, Lilium asiatic
  Clone ID: LIB3230-032-P1-K1-G4
cccgatatgcctgcaggtccggaaatgcatgggtactatggagatgacggcagaggagctggacaacatgcaattagggacactgattctatcaatgcgtcttatgaccgttttctgcgcaatggcaacccttacggcccgggagaaaatgttagaccattgggtggcatgccaggtcgccctgtagaagatttgcgcatgttgggtgccggtgatggccggaatgtcggagttggaggtggcagaccagaactactccctcctgatgcctcaaacacagtctttgtggaaggactccctgctaattgtacacgcagggaagtgtcccatatatttcgcccttttgtaggttttcgagaggtgagacttgtgaacaaggagtcccggaatcctggaggcgatcctttggttc

SEQ ID NO: 4931 - DNA, 367 bp, Lilium asiatic
  Clone ID: LIB3230-032-P1-K1-G5
agacgatccttgttcaactaaggaagctgtctgtacctggaaagctcaccaaggggaagggctcaaacaagtgatgtggtaaaccaactgctgtcaataaaccagctgctggcaagccgcaggcgaaaattgcaacagagtagccaaagcccaaaacacactgctgccaagcccaaggctaaatctgctgttgtgaagaaagccaagcctaccagcccaaagccgaagactgttgccaaggctaaggcttcctgtatcgaatcctaaggctgttggacgttcagcaaagactgtcgccaaggagaatgctgtttgtcgtccagcaaagactgctgtcaagtaaaaggcttttacaacaaatctggag

SEQ ID NO: 4932 - DNA, 409 bp, Lilium asiatic
  Clone ID: LIB3230-032-P1-K1-G6
ctcattccttttttgatgaattgcgggatcccaatacacggttgcccaatggtcgcccactgccgcctctctttaacttcaaacaagaaaccatgcgggatgcttgcaaacaaacgactggatgacactttatcaaatggggttttgcagtacaaaatgttcgaagatatttcatcgtcttcgtgaacttgttggaatctgtaaacctacatctgtgaaaggtgtgcactatacaattttgaggtcgagcagagaaaacaatggcggtcttcaaaattttgatacggaaactatatcaaagcatcatgctaagctagatggtgcaaaacgcttactacaattgtgttttcacccaataactgaacctcgtaccaaaagagatttggttggtgatgttctttataataga

SEQ ID NO: 4933 - DNA, 287 bp, Lilium asiatic
  Clone ID: LIB3230-032-P1-K1-G7
aggagtgctagctcactaacaattgttttcaaaggacccatattcaaagaggggggggtatatatggtaagtgtaaatgaaaacatctctcggcctgatagacaaggctacttacgtcatactttcgaattattacctattgaggaacaggaccaaacaaatgtgaatatctcatttaatgttgagcatgcaaagagtgtcatttgcttgaacatatgacatgacgctctcaatgatgttccttgtctgcacaatatatgcaacgggtgtttctaataatgattacg

SEQ ID NO: 4934 - DNA, 408 bp, Lilium asiatic
  Clone ID: LIB3230-032-P1-K1-G8
tgtattcctatcgtggaatgggcctgtcaattggaacaatgattgctggatgggatgaaacaggtccaggtttgtattacgttgacagtgaaggaggaaggcttaaaggaacacggttttctgttggatctggatcaccatatgcttatggtgttcttgacaatggataccgttttgacatgtcaattgaggaagctgcggaactggctcgccgagccatttatcatgcaacgtttcgtgatggggcaagtggtggcgttgctagcgtttaccatgtggggcctaatggttggaagaagctttcaagagatgatgttagcgagttacattacaagtactacccggttattccagctccggttgaacaggaaatggcagacgtggctgaagcttattggccctttcgag

SEQ ID NO: 4935 - DNA, 396 bp, Lilium asiatic
  Clone ID: LIB3230-032-P1-K1-H10
cggacgcgtgggcttttgcagtgtgtgacaatggcaaccaatgagaatcttccacctaatgtcattaaacagctcgccaaggaactaaagaatcttgatgagaccccaccagaagggattaaagtggtggttagcgacgacggcttctctactatctttgctgatatagaaggccctgctggaactccgtatgagaatggtgtgtttcgcatgaagctgttattgtctcatgacttccctcaatcacctccaaaaggttactttatgaccaaaatctttcacccaaatatctcaacaagtggcgagatctgtgtcaacaccctgaagaaagactggaacccgtctcttggattgcggcatgttttgattgtggttcgatgcctactgattgagcca

SEQ ID NO: 4936 - DNA, 386 bp, Lilium asiatic
  Clone ID: LIB3230-032-P1-K1-H11
cccacgcgtccgcgacggcctcagcaaagatggccgggagcagcgacgaacccgacggacacatcagcaatcctgctacttctctattaaagaccgccgccggcgatccatcgccccacgacgtctcactgttcacccacactccttgctactgtgaggagaatgtgtacttgttatgtaaaaaattatctactcttggtcttgccgagccaatggggagagacctttttgttgtatttatatccaatgagaagaagcaggttccattgtggtgtcaaaaggcaagcaaaagaatggatggcttggtgatatgggattatcatgttatctgcattcagacgcaaagaaacggagaaaccagccctcacgatctggtatgggatttg

SEQ ID NO: 4937 - DNA, 164 bp, Lilium asiatic
  Clone ID: LIB3230-032-P1-K1-H12
cggacgcgtgggcaaatatctcaacaagtggcgagatctgtgtcaacaccctgaagaaagactggaacccgtctcttggattgcggcatgttttgattgtgggtcgatgcctactgattgagccattttccgaattcgcactggatgagcaagcttgcaagatg

SEQ ID NO: 4938 - DNA, 283 bp, Lilium asiatic
  Clone ID: LIB3230-032-P1-K1-H2
cggccggatcccggtcgaccagcgtcgccagcgtccgccagcgtccgggacctggtcgacaagctataccagtggacaagacaaaaacagcatattcatcggccgtctcacgccacccaatggccagagcacgagatggggcgctgccctggggtcctctggggcggcgaggcgtggtgccacggcaccggtacggctgtacgacgactgtacgagcgggcgccacggaagaagacaccccgctggacaagatggcaacaggcgtgcggacacgacagggcgc

SEQ ID NO: 4939 - DNA, 365 bp, Lilium asiatic
  Clone ID: LIB3230-032-P1-K1-H3
cggacgcgtgggcgcccatggaagaagattcctgaagtgactgacgccattcagaagggtgctgcagcgtacaattgcaaaattgttgaaggtgtgctcagtcaccagcttaaacagtttgtgattgatggtgataaagttatacttagtgtctcaaatcctgagacacgagtcgatgatgctgaattcgaggaaaatgaagtatatgccattgatatagtcactagcacatgtgaaggaaagccataacttgtggatgagaagcgaactacaatttataagagagcaggtgataaaaattatcatttaaagacgaaggcatcaacgtttatatttagtgaaataagccagaaatttccttatat

SEQ ID NO: 4940 - DNA, 261 bp, Lilium asiatic
  Clone ID: LIB3230-032-P1-K1-H4
gctgaggatgtgcaggggaagaatgttattaccaactctcggggtatgaatgtcggtactgacaagaagaggtctttggtccgtaagtggcaaactctcattgatgctcatgtgggtgtgaagactacacataactacactctccgcacgttctgtattggattcaccaacagacggcctaatcaaattaaacagacttgctttgctcagtccaaccaaattatacaaattcacttcacgatgactgagatcatgataaac

SEQ ID NO: 4941 - DNA, 420 bp, Lilium asiatic
  Clone ID: LIB3230-032-P1-K1-H5
cggacgcgtgggttccgctagtactaacacctatgaccaaaaagacacggatgctgatgatgtttctctcgcaaagaaaccaacctcagctgagatagctccttcctgccctgcatcgaacttggtgttcggttacctgaatctcatctccgatggtgttcacaattttacggatggaatggctctaggaagtgcatttttactgcatggttctgtcggaggatggtctcgaacattatttctgctcgctcatgagcttcctcaagaggtgggcgacttcggaatcttggtgaggtcgggattcaccgtctttaaagctctcgcctttaattttctgtcagcgctcgtggcacttgctggaactgccttggctttgattctgggaaaacagccagggcattcatctttgatagagggatt

SEQ ID NO: 4942 - DNA, 390 bp, Lilium asiatic
  Clone ID: LIB3230-032-P1-K1-H6
cggacgcgtgggcaaatatctcaacatgtggcgagatctgcgtcaacaccctggagggagactggaaccagtctttttactttttttttaaaaaccagccgccggggatgcctactgattgagccatttctgcgaatccacacagaatgagcatgctggcaagatgctactggaggactacgaggaatatgcaaggttcgcttggttgcacactggaatacatgcactcaagcccaatccgaatactggagcgatatccgaatctacgactgcactcaatgtggaccagaagaacactgtttgctgcgccaaggctcaaactaccagttataccctcgtggccccccaagatcaaaatgcaagtggccctcctatgacaagtgcggttgg

SEQ ID NO: 4943 - DNA, 330 bp, Lilium asiatic
  Clone ID: LIB3230-032-P1-K1-H9
cggacgcgtgggcttgaagccatgataagtcgcatggagcaggcgcaactcaaaactatgaaccttaccaataacgacttggcgaaggatcatctacgtcatctgatgggaggtcggtcaaacgtccaagatgaacttctttgccgctttgtctttccggagagacctggtgctcttatgaaatttttggactcctttagtccacgttggaatataagcctgttccattatcgttcacagggcgagactggcgcaaatgtgttggttggcatccaagttccgaaggaagatatggaagaattcaagagccgagctacaaatcttggattt

SEQ ID NO: 4944 - DNA, 400 bp, Lilium asiatic
  Clone ID: LIB3230-033-P1-K1-A1
cttgccctcctcggcaccggtgccgtttatgcggccacgcacagcctcttcaacgtcgaaggcggtcatcgcgccatcgtcttcaaccgcatccagggcatcaaggataaggtttatcctgaaggaacacatatcatgattccatggattgaaagacctatagtttatgatgtccgtgcacgacctcatcttgtggagagtacatctgggagccgagatcttcaaatggtgaaaattggacttcgagttcttactcggccttttcctgaccaacttcccactatataccgaactcttggggagaattataacgagagagtgttaccgtcaataatccatgagacactgaatgcagtcgtagcccaatacaatgccagccagcttctgactcaaagagaga

SEQ ID NO: 4945 - DNA, 399 bp, Lilium asiatic
  Clone ID: LIB3230-033-P1-K1-A11
atcctgctccccgggtgcgactacaaccactggctgatcgtgctggattttcctaaggatcccgctccgacacgagagcagaagatcgagacatacctcaacaccctcgccaccgttttaggcagcatggaagaagccaagaagaacatgtacgcgtttagcactactacttacacaggctttcagtgcacggtatccgaagaaacatcagagaaattcaagggattgcccggagttctttgggttttgcccgattcctatatagacgtgaagaacaaggattatggtggtgataaatatatcaatggtgagataatcccctgtaagtacacctatgaacgaaagaaaccccccaacaaaaaacatgaaaccagaagatatgaaagacgaagagatggt

SEQ ID NO: 4946 - DNA, 404 bp, Lilium asiatic
  Clone ID: LIB3230-033-P1-K1-A2
gcgtttgcaaataaaggctgctttctctctcctggtatcgacaaggttgttcagtctagtaaagtgaatccggcgcctggttttgtaacatgtaacctgaactcctctgggattgaagatgacgaagtggttgatactcgtgagcagattttgccatctgaggacagttctggtactcagatcaatgcagtactttcttcgactgctgatgctgttgtattaaatgtggtctcaattgagccggcttcctcttttacccaagttactgttggcatagctgattgcaaggagactggaggctcagctcttgagaatagagatcaaatcaacattaacgaagcggctgaaacagatgctttactgaagcaagatgatttgtccgctgttactgatccaacagttga

SEQ ID NO: 4947 - DNA, 299 bp, Lilium asiatic
  Clone ID: LIB3230-033-P1-K1-A3
gtcgcacgttatggctgtagatccgctcttgttctcaccctagtgatatcggcgctcggattattgaatacttgggtaaaggtcaagatctgcattaagagactgcatgatccaaccatggtgaaggggatcgtgatagtgccgtaccgatcaaaagaggcgggcctgtaagcttcagcattagtgtatgtgctgaagagtgcatatagcaaagggaaactatgatatgatgatgcgcccgggctaattcatgttcacgaggaaacagacgaccgttgcacgaatacatgttggccaat

SEQ ID NO: 4948 - DNA, 399 bp, Lilium asiatic
  Clone ID: LIB3230-033-P1-K1-A4
cggacgcgtggggtcggtccccgcactctcctcctcaccctcgtcgcgacggcgctgctctcctccgcatattcgttggatttcgagtactgcaataagagggcgcactacccggtcaaggtgaaggggatcgagatctcgccgctaccgatcaaaagaggcgtgcctgtgagcttcagcatttctgcatctgctggggagtccatatccaaggggaaactagttattgatgttgcgtactggataattcatgttcacgaggaaacagatgacgtttgcacaaagacatcttgcccaatcgcaacatgggatttcgtgatatcccatcagcagacactaccatccctcactccaccgggttcggacacactgacaatgaaggtgttgggtgaagatggc

SEQ ID NO: 4949 - DNA, 226 bp, Lilium asiatic
  Clone ID: LIB3230-033-P1-K1-A5
cggacgcgtgagttcgatcgtcgctctcttataattacccttgtcgtgacggtgctcgggtaatccaaatagtcccagccattcacgtactgcaataagaggacgcactagccaatgaaggagaagaggatggtgaaataaacgtaccgctctaaagaggcttacctgtgagctaaagaatatttatgtctgttggagagctacatatacaatgtgaaactggtta

SEQ ID NO: 4950 - DNA, 344 bp, Lilium asiatic
  Clone ID: LIB3230-033-P1-K1-A6
gctaggcgttcacggacgcgtgggcatgtacaacgtagaggtaagcagacaaagcctctatctgtttctgttacatagccgtgcaagaagtgtggtgttcaccagcggcagaggctggagaaaaggcaggatggtggcgggcgagagactgcgatagaggtagtatctctgggttcacgatagttttaagggacggagactccgtgacttcgatctgacacggatgtgagggataacttcgagcgtattgatgactccgtggatgtgatggctgcgctaccggcttgggctcaggatgattattgttatatgatcgagcttagctttataggcactcgcctaca

SEQ ID NO: 4951 - DNA, 378 bp, Lilium asiatic
  Clone ID: LIB3230-033-P1-K1-A7
caaaattgcaaaggtcatgctctttgcagctgacaacatacctcctttacaggagctgacatatgactatggctacatcttggatagcgtggttggatcagatgggaatgtgaaaaagctgccttgttactgtggagctccagactgccgcaagcgactctattaggcttggcggattcaatattttcctatttatcattctagtttgcattaatcatggtctctatttatcttttagtacttatttaagtcatggtcgactgctgctacgttaataagagaacctagtggtgtgatgtgggatttatgctattttaaggaaccgtagtgttgtgtatggattctgaacatcaaattgctacttgtgtttcggctgtt

SEQ ID NO: 4952 - DNA, 272 bp, Lilium asiatic
  Clone ID: LIB3230-033-P1-K1-A8
aaactctagaaacttgtttcactatttatcaccatacgattcgcgcatgcatgggggttgaagaatattgtatgccacgtacaagacaagatctataaagccctaaggactagcgatgaactaccccaagtctgagacgaagaaactccactcgtttctttaatcctccttgtatccaagaactctacttattgacagattccagttcagttaaggagaactaagtagtcctattctgttagataacatatattatcttttttctgcttgat

SEQ ID NO: 4953 - DNA, 184 bp, Lilium asiatic
  Clone ID: LIB3230-033-P1-K1-A9
gcgggtctgagtaaatggcaccagctctcgttaaccctcgcacatatatgatggtgggtgcgatgagagaggtgaatccatacagaatattgcgaacgaaggacatctgactggtaatacaactgctcgatgatggactaaaggaacatccgcctggcgatatacaaggtgagctaccggaaag

SEQ ID NO: 4954 - DNA, 206 bp, Lilium asiatic
  Clone ID: LIB3230-033-P1-K1-B10
cttctgattcaatgtccatagttgtcgttcacattgcaacatccattctggggggggagttcacaattgttcttctttagttaccttatttaactaatgacatataagtgttaatttcttcactatcattatgtaacacttatgatcaatcttttataattaattatccatatttattaacttttgtatcttacaaagatgttttt

SEQ ID NO: 4955 - DNA, 212 bp, Lilium asiatic
  Clone ID: LIB3230-033-P1-K1-B11
atcctgcttcattggtgctacttcaaccactgtctgatctgtctgtcattgtgcgggggatccagtttcgactcacgagcataacatcttgacataccttaactccctttttacctttttactctgcatgtattaagtcatgtagaacatgtacttgtttatcactactacgtacacaggcttttaacgttcgattttcgtatattcatcaa

SEQ ID NO: 4956 - DNA, 261 bp, Lilium asiatic
  Clone ID: LIB3230-033-P1-K1-B2
ctcgcaaattaaggctgttcactctctctttttatcaaccaagtcacatactctggtgggttatatacttattctgtgtttctaacatacaaccttaacatacctcactttcaaaacaacgaaaatgttaatcctatttagccgattctgctatataaaaacatttctttaacctaaatcaattcaaatcttttttcgactgcttatactattgtaatcaatttattcttatttgaccctgatttatttatttcccaaatt

SEQ ID NO: 4957 - DNA, 401 bp, Lilium asiatic
  Clone ID: LIB3230-033-P1-K1-B3
gtcgtagtatattgttttagatctgtagttttttttttccgattgatatgtttgctttgtttattgattactgtttaagggtttttatttttcttttcctactttctgctttaaccattatgaatgtggggctgatagtcacgtatctctttagatattttgattcctattccttcgtgttaggttatgtttttaatatttttttagctattttgatttttatattcttttgtgcccggactcattttgatttctatcttgttgtgcaccgagtccaggatttctgttggccaagaaatattacagaaaaattcttagtatatttgttttgggagaaaatatgcatatcttggtttgcttttaaaggttgttcgattcagaaaagaatattgattgtttta

SEQ ID NO: 4958 - DNA, 401 bp, Lilium asiatic
  Clone ID: LIB3230-033-P1-K1-B4
cggacgcgtggggtcggtccccgcactctcctcctcaccctcgtcgcgacggcgctcctctcctccgcatattcgttggatttcgagtactgcaataagagggcgcactacccggtcaaggtgaaggggatcgagatctcgccgctaccgatcaaaagaggcgtgcctgtgagcttcagcatttctgcatctgctggggagtccatatccaaggggaaactagttattgatgttgcgtactggataattcatgttcacgaggaaacagatgacgtttgcacaaagacatcttgcccaatcgcaacaggggatttcgtgatatcccatcagcagacactaccatccctcactccaccgggttcgtacacacttacaatgaagttgttgggtgaagatggcaa

SEQ ID NO: 4959 - DNA, 104 bp, Lilium asiatic
  Clone ID: LIB3230-033-P1-K1-B5
cggacgcgtgggcttgaacgaggacatataataaggatacgtatagcgatgatgctggtgtcaagcacagagtccgaggcattcaaaaagtgaagtgagggcta

SEQ ID NO: 4960 - DNA, 401 bp, Lilium asiatic
  Clone ID: LIB3230-033-P1-K1-B6
cggacgcgtgggttccaaaggtcattgtgaagaaggaagtatcttgtactgcttcatctcttgaccaaagagtgccatccattcacaatgttaagggaggtctgcatattggtaatggattgaaagatgcaagtgagaaaaaacccatcggagttgacttaaacaaaacggaaatctcgaaaatggatggggatttgctttctacagcagaatccttttctggtaggaaaagaagcatcagtgagagtcaatgtgccgtcccgactgcatgcatgtctatatctgacgtcaaaacaccggatgagcatgaaccctttacaccagattttttgaccggaacttcctcaaaacggccagacagatgtggtgtagtgaaggaaggagatgattcccaatgcagc

SEQ ID NO: 4961 - DNA, 396 bp, Lilium asiatic
  Clone ID: LIB3230-033-P1-K1-B7
agactctagaagcttgtgtgagaggagatcaccattggttgtgcatgcatggtgctcggagaagaagggatgccaggcagaagacgagatctataaagccctaaggacgagcgatgaagttccccaagtctcagacgaagaaattcactcgttctctgagcctccttcatccaggaactctgcttagtgacagagtcgagttcggggaaggagtaggtagtagtcgtattctgttagataatatgtatttttttttttctgttgagttgtagtagtttagatctttattctctttcgtgttgtagtttctttgctttcgatcctgtctgtaacattgattctcgttttagttcttctgtaatcaacttttattttaatataaagtgttgttattct

SEQ ID NO: 4962 - DNA, 376 bp, Lilium asiatic
  Clone ID: LIB3230-033-P1-K1-B8
cggacccggacgaaacgccccggccgacgccttacgttcgtaacatattgatttagatctgtaggtgtttaccaccgattgatcatgcagcttggtggattgattacgtgtgcaagcgcacaatattatacttatcctactttctgctctaaccattatgaatgtggggctgatactcacgtatctactcagattattagattcctattccatcaacttaggttatggacttaatattattttagctatttttatttttatattcttttctgcccgaactcattttgatttctatcttgttgaacaccaattctataattccttgtgctcaataataattacaaaaaaattcttagtatatcgtctgggaagaaaa

SEQ ID NO: 4963 - DNA, 204 bp, Lilium asiatic
  Clone ID: LIB3230-033-P1-K1-B9
attctgtataaatgcccacagtagttgttcactattgaacattcatgcttgggggtgcggtcacactggttccccaatatatacctatatctatcaagcccttcggactagcaattgaattacccaattgtgtaacgtagatttttactctcatttttgaccaacttgatgtactagcttactgttactgccatagtagaatat

SEQ ID NO: 4964 - DNA, 385 bp, Lilium asiatic
  Clone ID: LIB3230-033-P1-K1-C1
acggaactggggccagaactggcagtcaaacgctgtgctggtcgggcaggcgctgtcgttccgtgtcaccggcggcgaccaccgcacttcgacttcatggaatgttgctccggctgggtggcagttcgggcagaccttttccggcaagaactttagggtctgatggttttggtggatttgtttttgttgtggttatggtgttagtaaggaaagaattagggttaggtagtgtgtgaagtgtgtaagagtttgggtattgagatgggtgaaattagtagtgggtggtggctttttatcatcactctgtagctgaagtggccgcataaccaaaaagggagggtggggcccgcagcaactacaggttatatgtatcagactttgatac

SEQ ID NO: 4965 - DNA, 318 bp, Lilium asiatic
  Clone ID: LIB3230-033-P1-K1-C10
ctcggaacacgacacccacagaccgagacacatgcggagtatgcgctctgacggcggagatcatagaagtgcaactggattccctttacgccaccaaactcatggaagtggatgctgtatggactgaccaaacaaccgctacggaacgcgagttacttcaagagcaaccgatacgagaacatgcaaactcagtggtggatcagttaagagaagttgagcaagctcacgaagatcctcaccaccatcaccaaaagaagaatgcactggtgcagtggaatcccaataatgcgaacgcaacaaagatgaaggctctggaaa

SEQ ID NO: 4966 - DNA, 179 bp, Lilium asiatic
  Clone ID: LIB3230-033-P1-K1-C11
atcctgattcaatggtcccacttctagcacaaactgaaacatccgcactgtcgtgggaatccatatatttcaaacaagaataaccatcagtcaccaatgacatccaattctatactgtatctcttcatgaatcaacacaagatgaacctttaattatttaataactatttatacaatat

SEQ ID NO: 4967 - DNA, 396 bp, Lilium asiatic
  Clone ID: LIB3230-033-P1-K1-C12
cccgccgcaagcaccaccgccaccggaaccccccgccgctgttatggcgcttccgggtcagcaggctgtcgagtaccccagcttcaagctcgtcatagtcggcgacggtggcacagggaagactacgtttgtgaagaggcatctgactggagaatttgaaaagaaatatgaaccgactatcggcgtggaggtccatccactggatttctttaccaactgtggaaagatcaggttctattgctgggacactgctgggcaggagaagtttggaggactgagagatggatattatatccatggacagtgtgcgatcatcatgtttgatgtaactgcaaggcttacatacaagaacgtccccacatggcatagagatctttgccggtgggtattggagtt

SEQ ID NO: 4968 - DNA, 287 bp, Lilium asiatic
  Clone ID: LIB3230-033-P1-K1-C3
cggacacattaattaaatccccgcactcttctactcaccctatatcgcttccgcgctggtctacttcaaatattctttggatctccagtactgcaataagagagcgcactgcccggtcaaggtgaaggggatcgatatctacccgctaccgatcaaaaaaagcgtgcctgtgagctttaccatatctgcatctgctggggagtccatatccaaggggaaactagttattgatgttgcgtactggataattcatgttcacgaagaaacagatgacgtttgcacaaata

SEQ ID NO: 4969 - DNA, 93 bp, Lilium asiatic
  Clone ID: LIB3230-033-P1-K1-C4
taattttactaatcaaattcttgttgggatatattcctccaattcccctcctcctcccaacaaggcaacaacaatctgttccggccgccaaac

SEQ ID NO: 4970 - DNA, 231 bp, Lilium asiatic
  Clone ID: LIB3230-033-P1-K1-C5
ctaacgcattaattacaacggtcatagagtataatgatgcatctcttcttgttgtgggggtcgaccaaagagcgccatacattcataatgtatctgaaggcatgcgatattcgtaatggtttaaatgatgcatgtttaaaataaacctactggcgattacttacacataacgggaatctctaaaatggacctcaatttgctttttatagcacaatccttttttggtataaa

SEQ ID NO: 4971 - DNA, 394 bp, Lilium asiatic
  Clone ID: LIB3230-033-P1-K1-C6
agactctataaactttaattatattagattaccataattcattcattacatgcttttgggataaaaaatcattcctctccccctcactataactatgaaacactaactaattgctatcatttaataaattctattataaaaaaatttactcgttactattttcctcctaaatcctataactctattttatttcagttaccttttctctatatttttatcttctgttctaatactaatttataatatcttttaattttttttcataactaacttcatatatatatcttactacttactcctccataaacttattctcttacaatcatatattaactgcaaagcttacatacaaaaactgtcccacatggcatataaatcttttcccgtcggtatt

SEQ ID NO: 4972 - DNA, 399 bp, Lilium asiatic
  Clone ID: LIB3230-033-P1-K1-C8
cttgcaaataaaggctgctttctctctcctggtatcgacaaggttgttcagtctagtaaagtgaatccggcgcctggttttgtaacatgtaacctgaactcctctgggattgaagatgacgaagtggttgatactcgtgagcagattttgccatctgaggacagttctggtactcagatcaatgcagtactttcttcgactgctgatgctgttgtattaaatgtggtctcaattgagccggcttcctcttttacccaagttactgttggcatagctgattgcaaggagactggaggctcagctcttgagaatagagatcaaatcaacattaacgaagcggctgaaacagatgctttactgaagcaggatgatttgtccgctgttactgatccaacagtt

SEQ ID NO: 4973 - DNA, 362 bp, Lilium asiatic
  Clone ID: LIB3230-033-P1-K1-C9
cttgtgattcaatggccacagttgaggttgaatctgcaacatccgctctgccagttgaggccacagaggtccaacaagagttacctgtggtaaccaaggacatcgaagtggaagctgcagcaatagaagaagcaacaccagaggaaccgtccataactgaagaaccagtggtgcaagaaactgagaccacgaaagaagaagaatcaaaggaagtagaggaagtacaagaagcagctaagaccgccaaagaggaagaatcaactgaagcggtagatgtgcaagaatccgagagctccaaagatgaagaatcagcaaaagtggtagaggtgcaagaagctgtgaccaccaaagatgaggaacca

SEQ ID NO: 4974 - DNA, 320 bp, Lilium asiatic
  Clone ID: LIB3230-033-P1-K1-D12
cccgcctcatgcaccacacacatttgtttcaaccaccgcaaatataacactggtgtgtcattatgcttttttgtaccccaccttcaatctcgtcatattcagctactgtggcacatttaagactacctttagaaagaggcatatgactggagaatttaaaaagaaatatgatccgactattcttgtgtttgtacatccacttaatttttttaccaactgtggaaagatcaggtttttattgctgaaacacttattttctatgataattttagatgactgacacatggatattctatctatgtacatgttacgatcatcat

SEQ ID NO: 4975 - DNA, 316 bp, Lilium asiatic
  Clone ID: LIB3230-033-P1-K1-D2
caaacgcactaattaaatccccgcactcttatactcatcctattccccacctagcttgtgtaattcaaatattctctgaacctcccgtccttcaataagaaaacacactgcccagccatgttgaagtgccatccagacctacccgctactgatcaaaataagtcttcctatatgcttacccaatttttaatcaccggccgagaccatataaaaagtgaaactagaaattgatgtcgtgtcctgacttatttatgttcactaggaaacacattacgtctgctcaaatacatttttaccagtttcaacagtttcgatt

SEQ ID NO: 4976 - DNA, 93 bp, Lilium asiatic
  Clone ID: LIB3230-033-P1-K1-D3
taaacgcactaatcaaattcttgaagttttatattcatccaattcccctcctcgttcgggcaaggcaacaacaatctggaccggccgccaaac

SEQ ID NO: 4977 - DNA, 413 bp, Lilium asiatic
  Clone ID: LIB3230-033-P1-K1-D4
cagtgatgcttgagttcatgcggaggttgcggcaggttgttactgtggggatagttggaggttcggatctgatcaagatctcggagcagatcgggagttctgtcatcaatgactatgactatgtattctctgagaatggtcttgtggcttacaaaaatggggagctgctcggtacccagagtttgaaatcattcctcggcgaagaaaatctcaaggaattcatcaattttactcttcattatattgccgacttggatatcccaataaaaagggggacgttcatcgaattccggagtggaatgctcaatgtctcacccataggccgaaactgcagtcaagaagagcgagacgagtttgaaaagtatgacaaggttcacaatgtaaggtcaaagatggtctctgtgctccgtgaa

SEQ ID NO: 4978 - DNA, 401 bp, Lilium asiatic
  Clone ID: LIB3230-033-P1-K1-D5
cggacgcgtgggattttattccgaaattggactgggttactcctctacaatagctcaactccaagtacaccccatgtagaggcatgacagcatcttcggggcctgatcaaattaattgggcaggtcgtgggttcgaaccttgcagcctgtagggaattgatattttgttgttgttgttttatgttaaaaaaagaaaaagtaagatgcactggtccaatttttaataataaaagaagtaagatgctccagtccaatttcagaaaaaaaaaaataataaaagaagaggtaagatgctcattttgagctgattacataaacagatatggataaaatgaccaaacggccaaagaattattaatatttaacttgggggtatgtacctatccatgcactcctcctgg

SEQ ID NO: 4979 - DNA, 338 bp, Lilium asiatic
  Clone ID: LIB3230-033-P1-K1-D6
actccaaaattaggatatatactccaaaattagggtattgaaagaataacaataaatgcggcaccgccaaatttttccatagagcaaaagaaaatttcaaatgcataacaagaagccaagaaatagtctcagtctaggcaaatttgccaagaacatattaggagatacagaacagaataatcccaaaaataaacaatctagaagcacttcctgtggacaatggacgggccagattcatcgaactcgcccttggatatccacatctgctggaatgtgctgagagaagccaggatagaccctccgatccagacactatatttcctctctggcggagccac

SEQ ID NO: 4980 - DNA, 392 bp, Lilium asiatic
  Clone ID: LIB3230-033-P1-K1-E1
cggacgcgtgggaacttccccgcttcaagatctcattcgggtttgaagcatctgaagtcctgaaaggtttaggcctgatactgcccttcaccggtggcggcctgacagagttggtggattcacctgtgggtggtaacctttatgtgtcttcagttttccacaaatcggttgtcgaagttaatgaggaaggaactgaagcagctgctggtactgctgctgtgctgttgttgaggtcgttgcctatggatccgttggactttgaggcggatcacccgtttgggtttgtgatcagagaagacactactggagtggtgttgttcacagggcatctgctgaatccatccataaccgagtaactctctgatggtatcagagttctgtaacataacgct

SEQ ID NO: 4981 - DNA, 401 bp, Lilium asiatic
  Clone ID: LIB3230-033-P1-K1-E3
gagaaatgtagggcaatatcatcaaaccagtttgggttctcaactatactcgggagttaacagtcagacgtatggaccccctgggtctgcattacctagggttggtggacctcaggttggaaccggttctggtcacatgttccccccaccagctgcacatacacctgttcctgggagctttatgccagttactaatccaggtttaactcagagacctggtacgggccctgtgcaaccacccagcccaactcagtcaatgcatgtgcaaccacctgccgcagctccggcagctcctcctcccactgtgcaaacagtgaatacttcaaatgtacctgctgagctgagacctgttatcagtactttgaccagacttttccacgaaacatccgagattcttggtg

SEQ ID NO: 4982 - DNA, 247 bp, Lilium asiatic
  Clone ID: LIB3230-033-P1-K1-E4
gcgtggacgcgtgggatgctatagggaatttgttttgggatactactatacaatagctgtgcgcacaagtacaccccatgtcgaggcatgacagcatcattgacggctcgagatcaaattaatggggcaatggcgtgggttgctaacatagcatggctgtggtgaatggatcatcatagttggagaatgatttatgtggagaaaagaatcacgaggaagcactgatccaacttttaataataaaaga

SEQ ID NO: 4983 - DNA, 217 bp, Lilium asiatic
  Clone ID: LIB3230-033-P1-K1-E5
cggacgcgtgggatttcatttcgaaataggtctggggcactcctctacaatagctcagctacaagtacacccgatgttgaggcatgacagcatgttcggggcctgatcaaattaattgggcaggtcgcgggttcgaaccttgcagcctgtagggaattgatattttgttggtgaggtagaatgttgaaaaaagaatatgtatgatgcactggtccat

SEQ ID NO: 4984 - DNA, 396 bp, Lilium asiatic
  Clone ID: LIB3230-033-P1-K1-E6
catggtcaatggtttccaccaaggtattcttagattggctatggaaccttccttgttaggggctgctcttatggagggtggtcctgatagaaaaattaaactggaccgtagtcctggggttgatgagctattcatcgaagggtacctacaggctatgttggacgtgatgtacaaacaacagtatcttcgagtaagggtaattgatgaccaggtcgtgctaaaaaatttaccaccaaatagttctgtcataaatgacatagtggaagatgtgaagggttttcttgtgagcaaagcattgttgaaaggagacgattcaatagctcctcgccctttacgccatctgcaaaccggaagtgaatggaaaattgggccaacggtgcttactctgtgtgagca

SEQ ID NO: 4985 - DNA, 394 bp, Lilium asiatic
  Clone ID: LIB3230-033-P1-K1-E7
cggacgcgtgggtggaggcgcacgcgagggcgatctgcgggagcggcggtggagggcgggtgctcaatgtggggtttgggatggggcttgttgatgaggcgattcaaaagtacaagccggaagagcatacgattgttgaggctcatccggaggtttatgagaggatgattcggctggggtggggggagaaggagaatgtgaaggttgtgtttggccgatggcaagatgtgatccctcagctcggatcctatgatggaatatttttcgacacctatggagaatactacgaagatctgaggcaattccatgagcaccttccaaggttattgaagcctggaggtatttattcatactttaatggcctttgtggggggtatgcattttttcattgtgg

SEQ ID NO: 4986 - DNA, 399 bp, Lilium asiatic
  Clone ID: LIB3230-033-P1-K1-E9
ggagaaatcattctccaaggcgcagatcttctccatctagttaccattctcgtcgtcgatctccaaggaagccttggtcgccacctgctaaccgcaacactggaattggaaggcccggaaataatttatttattgcaggttttagctatgttactaccgagagagatctggaaaagaagttctccagattcggtcgtgtggtcgatgttcgggtagttcgagagagaaggacgggggattctcgtggttttggattcttatctttcgaaaaggatgaagatgctgatgctgccatacgagcaattgatcagactgagtggaatggtaggattgtcctggttgagaaatcaaagacagccctccgctgaagcaagttggagttttctcatgaagagctat

SEQ ID NO: 4987 - DNA, 397 bp, Lilium asiatic
  Clone ID: LIB3230-033-P1-K1-F1
gccacatttctcctcatttgtgcttatgctagctcggatccttggccatgacgaagcgcaccaagaaggctgggattgttggcaaatatggtactagatatggtgccagtttgcgaaagcaaattaagaagatggaagtgtcccagcatgcgaagtatttctgtgagttttgtggaaagtattctgtgaaaagaaaggcagtagggatttggggttgcaaagactgcgggaaggtcaaggctgggggtgcttatactttcaacactgccagtgctgtcactgtgaggagcaccatccgtcgtctgcgagaacaaaccgaaagttgatcaagagaagcaactatatcagtgcccctagttttaacagtttatttatattgagaactatggtttaatgc

SEQ ID NO: 4988 - DNA, 395 bp, Lilium asiatic
  Clone ID: LIB3230-033-P1-K1-F10
ccaaattagggtttttacagctcggcgatggattccttctcgtccccctcgctctccgacggcgcctccggctcgtccccctcgccagcggtcatcatggaccagatcagaacccagatcgccaaggcttacgccgaagagatcctcgagacagtaaggggcaagtgtttcgacaagtgcatcacaaagcctggttccagcttgagcgggagtgagagcagttgcatctcccggtgtgtggatcgctatctcgaggcaacaggtatcattggtcgggctcttttcagtcagaagcattaaactcaagtacctactgccaccgtgatagattttatgctatattattgtcttcaaaacaatgtactaaactattttggtgaaattttgatgtgcta

SEQ ID NO: 4989 - DNA, 124 bp, Lilium asiatic
  Clone ID: LIB3230-033-P1-K1-F12
agaaaactttgaccatacgagatgtaaagcaaaatccgcgaatacatgcagctgtgtaaactatgggagagactggatataccacttactgccctttacttgccttttcatacaccaaaatacg

SEQ ID NO: 4990 - DNA, 403 bp, Lilium asiatic
  Clone ID: LIB3230-033-P1-K1-F2
ggaatggtcgtttggtcaactggtattggtacccgtcccgtcataatagatttcatgaaacagattggccagtctaatagacgagttttagcaactgatgaatggctgagggtccacgaatgtgatggtgtctatgccattggtgactgtgccacaataagtcaacggaaagtcatggaagacattatggagatctttaagctagcagacaaagacaactctgggactttaaccataaaagaaattcaagatgttcttgaagatatctgcgtattgtaccctcaagttgagctctatttaaagaacaagcatatgcgtgacatagtagatttgatcgagtccaaaggtgatgttgagaaagaatccatcacactggacatacaagagtttaagaatgctctag

SEQ ID NO: 4991 - DNA, 349 bp, Lilium asiatic
  Clone ID: LIB3230-033-P1-K1-F3
gcgtgcacgcgtaggatgataactggtattactaccgggatactcggaggctatgggatggcacaaattacgcagcatatgaaacgatctctacaaatatgacgaacggaacatgttccacgagaatggtggggggtgtaacaaagctgactggatcgcattgagctcaaagtgggccgtgggaaccatgcaacaataaatggaaggggtcgatcgaattcaatggtaatactataagccataatgtatatctgatccaaatagatttagcagcattagcggagatagcaatgattggtagttaatggtgtttggcaaggaacttggccaatgcaagtgagcgttttta

SEQ ID NO: 4992 - DNA, 404 bp, Lilium asiatic
  Clone ID: LIB3230-033-P1-K1-F4
gagcaacaatggcgtccatctcctcctgcaatttgaattccctatttcttggtgagagaagtgggattcgtgttgcagggccccctgcccacagggttcgagttctgagaaagccagtgcaatgcaaggaatctaggataggaaagaagttgatagaagtgccaccaaatgtaaccattgcattggaagggcagggcttgaaggttaaaggtcctttgggagagctctctaggatctacccacgtgaagtcaaagtcgaacgagaggaatctggaaacctgaaagtctctaaagcattggatacaagaagagctaaccaaatgcatgggcttttcagaactctaactgataacatggtagttggagtctcaaaaggattcgaaaagagactccaattagtcggg

SEQ ID NO: 4993 - DNA, 319 bp, Lilium asiatic
  Clone ID: LIB3230-033-P1-K1-F6
actccaaaattaggatatatactccaaaattagggtattgaaagaataacaataaatgcggcaccgccaaatttttccatagagcaaaagaaaatttcaaatgcataacaagaagccaagaaatagtctcagtctaggcaaatttgccaagaacatattaggagatacagaacagaataatcccaaaaataaacaatctagaagcacttcctgtggacaatggacgggccagattcatcgaactcgcccttggatatccacatctgctggaatgtgctgagagaagccaggatagaccctccgatccagacactatatt

SEQ ID NO: 4994 - DNA, 356 bp, Lilium asiatic
  Clone ID: LIB3230-033-P1-K1-F8
gtcagagtgaaattactgggcgattcaaatcgtatgatcatgaccaatgtgatggggcctgtaacagaaggcgacatactcactatgctggagtctgagcgtgcggtcaggaggctgatctgattgtgcatctttcaatgctgcgacatattaaaatgctccgatggttcatcttttacatctcattgtgtacttctaatcttgggatatgtgaaatatgactgactctataggttgatggtttggtagagatttacttggattgatgacctaagatggttgtgcttgcctatagctgcgtaagtccggactctatatgcttgctaggtattgatgtgctaaaagtgaagttatat

SEQ ID NO: 4995 - DNA, 396 bp, Lilium asiatic
  Clone ID: LIB3230-033-P1-K1-F9
attgtgtgatcaacatgatgcctaataatcactatacaaggggccgtggggattgtgtgatcaacatgatgcctaataatcactatacaaggggccgtgggaaccatgcagcaggggatggaagggattgtgtgatcaacatgatgcctaataatcactatacaaggggccgtgggaaccatgcagcagtaaatggcaggggtcgtggaattgacaggatgcctaatagtagtggttgtatatctgatccaaatagatttagcagcattagcggagatagcaatgattggtagttaatggtgtttggcaaggaacttggccaatgcaagttagtgtttttattagaaagtgtttgattgttcgataatgtggtatggcgccaatgtatgttactgg

SEQ ID NO: 4996 - DNA, 284 bp, Lilium asiatic
  Clone ID: LIB3230-033-P1-K1-G1
tgttgagagagcattctatgagcatgtacgacgaggtaaatctggagtgggtaatgctcgtgaaatggactttgaaagctttattgactttgcttggctcttgaaacaagtacttcttaagggtacggactattttgcttttggatcttttatttatggttaagttataaatttcgatattcatacccttttcagagatgtacaccaaaaatggattgagggcggtaactatgaacatctgatcgaagatgttatggatgaaatattggatttggggaaaccag

SEQ ID NO: 4997 - DNA, 275 bp, Lilium asiatic
  Clone ID: LIB3230-033-P1-K1-G10
acaatgcagggtgctgtgagcaggaacatggtggagagcctcactgtgccaacgtttcgagttggttacactattaacactgatgcacttgatgcgctctacaagaaaataaaatcgaagggcgtgacgatgaccgcgctgctggcgaaagcgactgctcttgctttggtgaagcacccggtggtcaattctagttgccgggatgggaagagctttacgtttaacagtagcatcaatattgcggttgccgtggctattgacggaggtttgatcac

SEQ ID NO: 4998 - DNA, 136 bp, Lilium asiatic
  Clone ID: LIB3230-033-P1-K1-G12
acgaggacgcgtgggcggcggccaagattacggttgttacgccacattgcacaacggcggcaacctggtcgtctacagccccaacgccatacccctgtggcagagcggcaacggaaccacaggagggggaatatgt

SEQ ID NO: 4999 - DNA, 371 bp, Lilium asiatic
  Clone ID: LIB3230-033-P1-K1-G3
cccacgcgtgcgattcaattacgaaattgttttgagatactactatccatgtagttcaggatcaaaaaacggttgagggcggagacttgttggtattactgttggagtaaatgatatcattgggcaatgactggatgtgacaaaaaaatgacttgaggttatggtatcaacgctgcaagcgattaattggccaaatagaacacagatgcatgcataattcctaactgttaatacatctaagcagtgtgccatattgcacaccaatgcgtgcgcttaaaatttattacatgatttggtttgaaattgattgtcaattgcgacttctaagagttctagggaaatcaaacaatgggaaaatgggttgacaaaat

SEQ ID NO: 5000 - DNA, 160 bp, Lilium asiatic
  unsure (1)..(160): unsure at all n locations
  Clone ID: LIB3230-033-P1-K1-G6
gcgtacgaacatgcgtgtgcgtgtggcatgcttaccagaagcattggttggcgaacaatactctggcgattgccttctgcattcaaggaattgaaatgttatcattgggctcatttaaaacttgcggcattcttcttgctggatngtactttatgatatc

SEQ ID NO: 5001 - DNA, 398 bp, Lilium asiatic
  Clone ID: LIB3230-033-P1-K1-G7
cccacgcgtccggagcaagcaggagctcaaggaatacgcagatgggacactgacagaaatttttgttgagagagcattcgatgagcatgtacgacgaggtaaatctggagtgggtaatgctcgtgaaatggacttcgaaagctttcttgactttgttttggctcttgagaacaaagatactcctgaagggttgacgtacttattccgttgtctcgatctcaatggaaggggttaccttacaacagccgatattcatacccttttcagagatgtacaccaaaaatggattgagggcggtaactatgaactctgcatcgaagatgttagggatgaaatatgggatatggtgaaaccagccaaccatctgagaataactctcgctgatctcctatcctgca

SEQ ID NO: 5002 - DNA, 398 bp, Lilium asiatic
  Clone ID: LIB3230-033-P1-K1-G8
gcgggaagcaccgcggattcagttggagagaacagtagtgatccatgtagtacaccatcggagccggttgccccggagactgttgggacgacagctgtagtagctgttatcagttcttcgcacatcattgttgctaattgtggggattcgagagcggtcctatgccgtggaaaacaagcagtgcctttatcggtggatcataaaccaaatagagaggatgaatatgcacggattgaagcagaggggggcagagtcatccagtggaatggataccgtgtgttcggtgttctggcaatgtcaaggtcgattggggatagatatctgaaaccatggattatcccagtcccagaagtcaaaattgttccccgaatgaaagaagacgaatgcctcatcctggc

SEQ ID NO: 5003 - DNA, 289 bp, Lilium asiatic
  Clone ID: LIB3230-033-P1-K1-G9
attgtgtgatcaacatgatgcctaatatttactatacaaggggccgtggggattgtgtgatcaacatgatgcctaataatcactatacaaggggccgtgggaaccatgcataaggggatggaagggattgagtgataaacatgatgcctaataatcactatacatggggccgagggaaccatgcatcattaaatggcaggtgtcgcggaattgacaggatgcctaatagtagtgtgtggatatgtgatctaaatatatttagcagcattagccgggatagtattgattg

SEQ ID NO: 5004 - DNA, 184 bp, Lilium asiatic
  Clone ID: LIB3230-033-P1-K1-H10
cggacgcgtgggcgggctccgcatcccctctccgtctgagattccccggttgagagagatggggctcactttcaccaagctgttcagccggttgttcgcgaagaaggagatgcggattctgatggtcggtctcgatgcggctggtaagacgacgatcctgtataagctgaagctgggcgagatc

SEQ ID NO: 5005 - DNA, 255 bp, Lilium asiatic
  Clone ID: LIB3230-033-P1-K1-H11
gcgtgcactcttggtctgagatcccttgcttgaaagagatggggctcaccttggccgagctgttcagccggctgttcgcgaagaatgagatgcggattctgatggtcggtctcgatgcggctggtaagacgacgatcctgtataagctgaagctgggcgagatcgtcaccacgatccctaccattggtttaaatgggagactggcgagtacaagaaccattaactttactgtttgggatgttgggggtaaggtta

SEQ ID NO: 5006 - DNA, 248 bp, Lilium asiatic
  unsure (1)..(248): unsure at all n locations
  Clone ID: LIB3230-033-P1-K1-H12
cgcatcccctctccgtctgagatcccccggttgaaagagatggggctcaccttcaccaagctgttcagccggttgttcgcgaagaaggagatgcggattctgatggtcggtctcgatgcggctggtaagacgacgatcctgtataagctgaagctgggcgagatcgtcaccacgatccctaccatcggattcaatgtggagactgtcgagtacaagaacatnagcttttactgtttgggatgttgggg

SEQ ID NO: 5007 - DNA, 397 bp, Lilium asiatic
  Clone ID: LIB3230-033-P1-K1-H2
atatggtcaaccgcttctgaaatcccaatccaacatatcaaaacagatatttcaggccaactttgctgttgaagacatgtcttctggatgttcgatgtggtcctctgatcatcttggtactacaggttctaccagaggggtcaacagtaatcacaatggcaacttggtaatgcagatgttagaaaagaaacagccctacactgtgccaccagaatccaatcatgctatcaacgtacagccgtcatgtctagtagttccctctgtttcgtcaaacagttttcagatgggtaggagttcagtttctttgaatgagaacactatagtagtaccctctcaagcatcaagcggtattcacgtgggactcaatcctgctcctgctaaacaaaattcttgtcgc

SEQ ID NO: 5008 - DNA, 408 bp, Lilium asiatic
  unsure (1)..(408): unsure at all n locations
  Clone ID: LIB3230-033-P1-K1-H3
cccacgcgtccgatatggtcaaccgcttctgaaatcccaattttacatatcaaaacagatatttcggggcgactttgctgttgaagacatgtctactctcngnncgatgtggtcctctgatcatcttggaactacaggttctaccagaggggtcaacagtaatcacaatggcaacttggtaatgcagatgttagaaaagaaacagccctacactgtgccaccagaatccaatcatgctatcaacgtacagccgtcatgtctagtagttccctctgtttcggcaaacagtttttcagatgggtaggaggtcagtttctttgaatgagaacactatagtagtaccctctcatgcattaagcgagtttcacgtgggactcaattcttcttctgctaaacaaaattcttgtc

SEQ ID NO: 5009 - DNA, 87 bp, Lilium asiatic
  Clone ID: LIB3230-033-P1-K1-H4
acgcggacgcgtgggcggtctccgcattttctgttcgtatgagataccgcgggtgtgagagatggggctcacttttcaccaaacctg

SEQ ID NO: 5010 - DNA, 203 bp, Lilium asiatic
  unsure (1)..(203): unsure at all n locations
  Clone ID: LIB3230-033-P1-K1-H6
agaaaactttcaccagacgagatgaagagcaaaacccgtgaatacatgcctctgtataaactaggggagagatgggatatcgcaatggctgccctttacttggcttctgatgcangtaaatacgtcaacggaactaccattgttgctgatggcgggctttggctaaacccgcctcgtcatatctccaaggacgatgtcaaaaa

SEQ ID NO: 5011 - DNA, 162 bp, Lilium asiatic
  Clone ID: LIB3230-033-P1-K1-H8
ggtaataaccgggtcgaccgacgcatgcgttctggtcaaccgtttttgtaatcccatttcaacatatcaaaacagatatttcaggcgcgactttgctgttgaagacatgtcttctggatgttcgatgtggtcctctgatcatcttggtactacaggttctac

SEQ ID NO: 5012 - DNA, 284 bp, Lilium asiatic
  Clone ID: LIB3230-033-P1-K1-H9
attgcgtgagcaacatgatgcctatttatcactatacaaggggccgtgggggttgtgtgatcaacatgatgcctaataatcactatacaaggggccatggaaaccatgcaaaaggagatggaagggattgattgatcaacatgattcctaataatcactatacaaggggccgagggaaccatgcattattaaatggcaggggtcgtggaaatgacaggatgcctaatagtagtggatgtttatcttatctaaatagatttagcatcattagctgagatagcaat

SEQ ID NO: 5013 - DNA, 421 bp, Lilium asiatic
  Clone ID: LIB3230-034-P1-K1-A12
tctttttctaatctcatcctctcctcatcacagttgaagacggcctcaagtgaagacatatctgaggcttcaatctcccggctcaggtgataaatatccatgtgatcaggaattggcagctctctgtgtcctatagctgtaaggagtgtagatttaccacatccattcaaaccaagaagaccatatcgcctgccatagttaagctccagttcagaatctactatgagatcatggccatgaaaagtaacagataaagactctatatgaatatctctagacatgggatgagaacagagcaccccggtacacgtccgatcggagatctggagcgctccaacaccattagaaatcttctccaccccattagcacccttcgacgggttctccgccaagctgactccgaaacaggttgccgatctgt

SEQ ID NO: 5014 - DNA, 429 bp, Lilium asiatic
  Clone ID: LIB3230-034-P1-K1-A2
cccacgcgtccgcccacgcgtccggcagaatgcaaacttgaggtcaatgcgatcgttcctgactcttttgattctcgtcttggatctgaacctcaggttttagtacacaagtcttccgagactgctaaagatgaggtcgttgcgatacaaggaattgttcctggcccttcggaggttgtatcggaatctcagattttagaatataagtctccagaggcaattactgatgtggttgttgcccatgatgtcgccgctcctgattcttcggaggtggctccagaagtctctgattctcctcatggagccgagccactagaattagtttgcaaatcgtccgagggacctgttgaagcagttgttgatgataatgtgcacgcttcttcttctttcggacaggaaactgatggtaaggcagaattggctagtatt

SEQ ID NO: 5015 - DNA, 137 bp, Lilium asiatic
  Clone ID: LIB3230-034-P1-K1-A3
gtacctgcttttcctattgtgagtcatattatggactatccaggctttggcctgtcctagggattgcacggctacattcccaactttgatgagatggttgactgtgtcattgatcgatacatctaaatccgagtttt

SEQ ID NO: 5016 - DNA, 420 bp, Lilium asiatic
  Clone ID: LIB3230-034-P1-K1-A4
cggacgcgtgggtgcaatgtcatcatacgaacctgaggcatatgaaataatgcagtcacttgatgtagattatgtacttgttgtatttggaggtgtcactggttattcttccgatgatattaacaaatttttgtggatggtgcgtattggtggtggagttttccctgtaataaaggaacctgattatcttgttaatggcgagtatcgtgttgacaagggagcagcaccaaagatgttgaactgtctcatgtacaagctttcttactatcggtttggagaactaaccaccgaatatgggaagcccccagggtatgaccgtgcaaggggtgtggaaattggaaataaagatgtgaagcttgagttcttggaggaagcgttcacaacggcaaactggatagttcgtatttacaaagtaaaacc

SEQ ID NO: 5017 - DNA, 292 bp, Lilium asiatic
  Clone ID: LIB3230-034-P1-K1-A5
ccaacacgtaggtgcagtgtaataatgctatacctgatcatatgcataaatgtggacactagaggtaaatgatgcactattagtaaaagctggtgttactgttgattaacacgatgatatgaacaaatgtgtgtggctggtgcagattggtggtggagttctaagtgactatgtggagaaccacaagttaccagatatctttggcaagttatgaccacagtgcactatctatgatattttacagtgttacagacaggctaagtaattgtttccataccagaattaagtttta

SEQ ID NO: 5018 - DNA, 426 bp, Lilium asiatic
  Clone ID: LIB3230-034-P1-K1-A6
ccattatgcaggtcaagaggaaaactgttatactccatataatccatacctatggactccaatggaaattgaggctgcatcaggaaaagctgagtgtccctttgttgaacataatctgaagttaaaaagtgcatataccgatgtagaggattctgcagggacaaaggactcaggtaaagaaccacaagttaccagttataataggcaatttatgggcacagtcgactatatatggtattctgaaggtctccagactgttaaagtacttgataccataccaaaacacgttttacagcgcaccctcggatttccgactcagaaatggggaagcgatcatattgccttggcttgtcagttctcgattacgaagagctagaaaaaggtgtatattcattcctattgatcatttagtggaagaatgacact

SEQ ID NO: 5019 - DNA, 417 bp, Lilium asiatic
  Clone ID: LIB3230-034-P1-K1-A7
cttagctacctccatacaaacatgagcatgatccatggcaatttgaccagcagcaacattctgctggatgagagcacggagccgaagatcggtgatttcgggctttcgaggctcatgactacggcggctaattcgaatgtgattgcgacggcaggggcgctggggtaccgggcgccggagttgtcgaagctgaagaaggcgagcacgaaaaccgatgtgtatagtcttggagtggtgatcttggagctgctgacggggaagtcgccgggggagtcgatgaatgggatggatttgccacagtgggtggcgtccattgtgaaggaggagtggactaatgaggtgtttgacttggagttgatgaaggatgctgagggaactactggggaggagctactgaacacactgaagttagcgctg

SEQ ID NO: 5020 - DNA, 422 bp, Lilium asiatic
  Clone ID: LIB3230-034-P1-K1-B10
agagaaaataaatttcaagggattcatgataggaaatgcaattctggacgatgaaacagacctgatcggtatgatcaattatgcctgggaccatgctgtcatctctaaccgcctttataatgctatcaagaaccactgcaattttagcctggagagtgataatcacgactgcgataatgcaatggatgatttctatgatgcatataatatcattgacatatacagcttaaattccccaatatgcgtacaatcgaacatgtccacctcatttcgtcggatgcaaaaatttgacagcaggaagcctaagttttccaaatatagatggcatcagatgccagcagggtatgatccctgcatatctgattacagtgaggtatactttaatcgacgggatgtccaatatgcgatgcacgccaatgtca

SEQ ID NO: 5021 - DNA, 423 bp, Lilium asiatic
  Clone ID: LIB3230-034-P1-K1-B12
cccacgcgtccgcccacgcgtccgcccacgcgtccgaagcagcagccggcggcggcgtcgttgccccggaagtacgatctggacgccaaatgggacgcctgcctcgacatcaccatccgccgattcgtttactcctccgtcgccggcgccttcggcggccttctcctcttccggagtccagcgacccgatgggcatctgtagcttttggtgctggcatagggattggaacagcgtatactgaatgctctcacatatttaatggttctcatccaaagttgccaccctcaaaagtctcggagcctcctgcttcctctctggagggacagaactgataggatatcaacctggatttcggcaatctcgttcagtttgcggatataatgttttttttcctgaagccagtgaacatggttattggttct

SEQ ID NO: 5022 - DNA, 407 bp, Lilium asiatic
  Clone ID: LIB3230-034-P1-K1-B2
acccttcaaaggctccgcatcttactgctttccttgggtacaaggctggaatgacccacattgtccgtgaggtcgagaagccaggatccaaactacacaagaaggagacttgtgaagctgtaaccatcattgaaactccgcccatggttattgttggagttgttggttatctgaagactccacgtggccttcggtctcttagcactgtctgggctgaacatctcagtgaggaagtgagacgcaggttctataagaactggtataggtcgaagaagaaggctttcacaaaatatgctctgaaattttcaactgagtccgggaagaaagaggtggaagctgagcttgaaaaaataaagaaatattcgactgttgttcgtgtgcttgctcacacccagattaggaagatg

SEQ ID NO: 5023 - DNA, 240 bp, Lilium asiatic
  Clone ID: LIB3230-034-P1-K1-B4
tctaatatgtaggttaagtgtcaaactattattctttataaaagccatacctatcggcgggggtggaaaatgaggctctatcactaaaagctgaaccatcctgagatgtataacctcctttataaaaatattaataacacctaccaatatttattctgcattagtcattgtactcacataaagaactacatgttactattaataagattcaaattatggccactgatctactatatataa

SEQ ID NO: 5024 - DNA, 426 bp, Lilium asiatic
  Clone ID: LIB3230-034-P1-K1-B6
cggacgcgtgggttccagaccaagcaatcagcttctttcaacatgagcacgaggagtggcttgaagccacagggtgccttcgccagaaatgtgcagcaacctacaaggagcctctctagcggtgcacgtgcttccccgtaccacccgtcgcccaagcctaacggtaaacagccgtgaacgtataaattgatatccttctatctatttgttggatgaagtgagaaggtgagggagttgtggcaccctttgttggttctaaattatttgaagatgtatctgtgtagtctatatgactgatgcatctcgttaagtgtgctcccctttttttttttttgtcaatattgcttttcttcgttggttgagcctctccctcaagagggccttgtcccccctgtttaggatatatgttaatttgtttggatcaaa

SEQ ID NO: 5025 - DNA, 419 bp, Lilium asiatic
  Clone ID: LIB3230-034-P1-K1-B7
atccgctccggccgtaataaatccaataaggccctccaccggcggcgagagccaccgtcagatctgcgagatcccccacctccgccgcgggtgtatccagttcaaataagtctgagcaaccatggttcttgattcgatatcgtctcctcaccgtagatcttctcaacaagttcctttccggaagcagacaagccgcgatgagtttggcagttggtctgctctcttcgcccgacaccgcttcctcttgacgatgcttgctcttttgacattcctctgcgccatttatctctactttgcagttactttgggtgcaccggaatcctgcttgagcaagtcaggagctgaaaaggcgctgtgtcaggccaaatcttcagtgttacatagggggaaactgagactcttctaatcgggtgtacttc

SEQ ID NO: 5026 - DNA, 292 bp, Lilium asiatic
  Clone ID: LIB3230-034-P1-K1-B8
cccacgcgtccgcccacgcgtccgcccacgcgtccgaagcagcagccggcggcggcgtcgttgccccggaagtacgatctggacgccaaatgggacgcctgcctcgacatcaccatccgccgattcgttaactcctccgtcgccggcgccttcggcggccttctccttttccggagtccagcgacccgatgggcatctgtagcttttggtgctggcatagggattggaacagcgtatactgaatgctctcacatatttaatggttctcatccaaagttgccaccctcaaaag

SEQ ID NO: 5027 - DNA, 209 bp, Lilium asiatic
  Clone ID: LIB3230-034-P1-K1-C1
cgcgcataatccatcgagatgttaagtcttcgaacatacttctggataaagatttcgaggctcacctcactgactttggtattgcgaagagcttatgcgtgtcgaagactcacacgtcaacctacgttatgggcaccataggctacattgatccagaatatgctcgcacctctcatctcaatgaaaagtcagatgtctataggtatggg

SEQ ID NO: 5028 - DNA, 323 bp, Lilium asiatic
  Clone ID: LIB3230-034-P1-K1-C11
gcctctcatggttaggaaggagaacatggtaggtagaacaactgccctcgaccaaccagatccgccagttgggaagactgacacaccagacgatccgttggtaacctacggcttcattagagctctacagaatcactttgaggctatgcgctccagcgattttgacaactgctcaatgagcacgaatcagtatgttcatggagagaggagcatgtgtcttttccggagacccttgtcagttacgcgatcgtgctaacatgagcagactctgcccatctctgccgattggtgaccgcgagccgcctcaggactttgaaatacag

SEQ ID NO: 5029 - DNA, 388 bp, Lilium asiatic
  Clone ID: LIB3230-034-P1-K1-C3
gccagttccgaaagattctaaatgtcatcgagcagaagtttttgccttcactcaaggaacgagatcccggtgctgatgagattatcacaagattacagaacttctttcaatttaaagtttacggaaaggaaccagaaggccgccagcttcgaaaatctttgttgtcaaatgagtttgaagcttgagtgatcaaatggaatcctgatgttgctgttactcgaacacctgaggaaaataactaccgagtctctgttgcctgggattttgccacattttctgtaacttatggaacctgcaatttggtaacttatgtaactttatgttttaaagtttggattataactagtaatttcagattatttatatttcaaaaaaaaaaaaaaagagc

SEQ ID NO: 5030 - DNA, 425 bp, Lilium asiatic
  Clone ID: LIB3230-034-P1-K1-C5
cccatccccaacagtacatttgttcgcctatccatatacaccagccaaggagtgtccctcctcaccgaattcttcttaaggttcccaggatcagacgtaaacgacatggtgacattggaactgacacagtcttgtctaggattgttatgtcttagaaccttgtttgatggagccatactagtatttaatccttcaaccaaggagatgataacactgccagaatgcccggacaaaaaaattgatatatgcattggattcggccatacagcttctactgaggaaatcaaggtggtcagattctttgcccgtcctgttgatggtgaagatgctgatgaagatgattgtttttgcgaggtcttcaccttggggacctctaatggctggagaggagccaagagccctccatacaggccttctaccaactc

SEQ ID NO: 5031 - DNA, 256 bp, Lilium asiatic
  Clone ID: LIB3230-034-P1-K1-C6
atcagctacggccatactaacatgaacatggcccttcaccacttgagcgagccgagcggggtgctgcaagagcgcgcacctcctacgagtgtgtattcatgtctaataagtctgatcaaccctggaccttcgttctatatctgactcctcacccaagaccctcgtaacacggtcctccccggatgcagacactccgttatgtgttcgcgtgaaccgatgcttttatccttcgacaccggttcactttgtcgatgcc

SEQ ID NO: 5032 - DNA, 201 bp, Lilium asiatic
  Clone ID: LIB3230-034-P1-K1-C7
cggacgcgtgggcggacgcgtgggttctgccaaaacaatatggctccctggtatgtcttccccatagcatattgcgaatttccttacccattcgactatctgatttgcaaactctcatcgcctgttcctcttagtttgagggctatatatatatatatatggtgtcaaggaggtgtgcactagtggagatggctctatgat

SEQ ID NO: 5033 - DNA, 252 bp, Lilium asiatic
  Clone ID: LIB3230-034-P1-K1-D1
cgggccccaggcacagggaaaacgacgactgtggttgagattatctttcaagaagtcaaacgtggatcaaaggttcttgcatgtgctgcttccaatatcgctgttgataacatcgttgaacggctttttccatatagggtaaagctagtgaggttggggcatccagcacgattactacctcaggtgctggagagtgcacttgatgcacaggtcttgcgtggagataatagtagcttggcaaatgatattcgc

SEQ ID NO: 5034 - DNA, 55 bp, Lilium asiatic
  Clone ID: LIB3230-034-P1-K1-D10
tctatcaacgtactaaatttatactttttgttcctgcactttttcctccaggtcg

SEQ ID NO: 5035 - DNA, 417 bp, Lilium asiatic
  unsure (1)..(417): unsure at all n locations
  Clone ID: LIB3230-034-P1-K1-D11
taaccggactgtcatagttgacaataatacgtggaacaatacccacattgcaactgttggtacagcaatgtcttccccagagaaaccagcctgggaaattttcaactccttagatgtcaaatatgttctcgttgtctttggaggtcttgttggatacccaagcgatgacattaataagttcctgtggatggttcgtattggaggcggtgtatttccgcatatcaaggaacctgattatcttagggatggtcagtatcgaattgattctcaagccactccgactatgttgaatagtctcatgtataagctctcctattacaggtttgtggagacagatggccagggctttgataaagtgaggaggacttgaatcgggaagaaatacttcanactaacccatttggggaggttttcacg

SEQ ID NO: 5036 - DNA, 421 bp, Lilium asiatic
  Clone ID: LIB3230-034-P1-K1-D12
gcctctcaaggttaggaaagagaaattgggagatagaataactgcccttcaccaactagtttccccatttgggaagactgacacagcatctgtactgttggaaacctttggctacattagattcctacagaatcaaattgaggctttgagctccccgtatttgggcagtggatcaatgagcacgaagcagtatgtacatggggagaggagcagtatatttcctgaagaccctggtcagttactaaatggtgctaaaaggagtagaaacagcccatctcaaccggatggtgatcgcgagccaaagcaggacttgaagaacaggggtctgtgccttgttccagtctccttgatgtcgaacatcggaagcgacaacgccgcagattactggcctccaagtttcgatggcggtttccagtaggca

SEQ ID NO: 5037 - DNA, 267 bp, Lilium asiatic
  Clone ID: LIB3230-034-P1-K1-D8
gttactgttgagcctgtgcgtgtattattgccgatgcgtccgtgatattgggcggtgggatggcttatgtgaactctatcgtgcattacgtaggataagctgcttggtatgtagcaagctgcatatgatatgaaccgatcctctttgtattccattagacagtgcaatacgtatctatgttcaacttaaaacttatttattttgtaataatatggggcgtcctttctagtggatccacgcttacgaccgctgtcatgcgacgttata

SEQ ID NO: 5038 - DNA, 425 bp, Lilium asiatic
  Clone ID: LIB3230-034-P1-K1-D9
ctagcaacgaacaaaattgaaactcttgatcctgcacttcttcgtcctggtcggattgataggaaaatagaatttccacttccagatattaaaacaagacgacgcattttccagatacatacatccagaatgacattgtcagctgatgttaacctggaagagtttgttatgactaaggatgagttttctggggctgatatcaaggctatctgtactgaagctggcttgcttgctctaaaaaggcgaaaattgaaggtacttaaaccaatattaaggagggccagggaaaaggtatggtcaagaaaaaagaaggggtaccggagggactctatatgtgagaagatcatggaattctttctgctggtcttcgtgtcaaataagagggggttgatgcttacggcccctttgaactttggcacttgctg

SEQ ID NO: 5039 - DNA, 212 bp, Lilium asiatic
  Clone ID: LIB3230-034-P1-K1-E10
cgagatcacactataaagaagaatcatggccaagcaccatcccgatctcatcatgtgcaggaggcagccaggaattgccattggaaggttgtgcaagaaatgtgatgggaagggtgtaatttgggactggaccgtccggccttgcactctggtccaggttttgattaggggcaccattgggcaattcaagggccaagtgttatattccgggg

SEQ ID NO: 5040 - DNA, 422 bp, Lilium asiatic
  Clone ID: LIB3230-034-P1-K1-E11
cccacgcgtccggttgaggaaaaggtacgccgcctacaatctcattgcgtatcaatttttccatttgactagatttgagaatttaagccctttcgatgaatcgatctctgatctactgttaaaattagagatcgggttttcattgggctgaaatcgaaggatatgttgagtcgcttctctcattcttgaggtgcagcgaataatttctccaatatgtgttgaaattttagatcatgcgattttagttcaattagtcattcggctgtgttgaaattgtagatccgatgatgacataaaatctttgagacctgataatttatttttgatgactacgcaagcaaaatttctgaggatctatattgtatcacaacttgctctgtttttgttaaatgttgtttacaattgggatgatgagatgcact

SEQ ID NO: 5041 - DNA, 169 bp, Lilium asiatic
  Clone ID: LIB3230-034-P1-K1-E12
tcggcctctcaagggtaggaaagggaaatttggagattgaattaccggcctttgacaacttgtttccccatttgggaaggccggcacaccatttgtactggtggaaacctttggcttcattagattcctacagaatcaaattgggggctttgagcttccccgatttttg

SEQ ID NO: 5042 - DNA, 423 bp, Lilium asiatic
  Clone ID: LIB3230-034-P1-K1-E7
aaaaaaaaaaaaaaaaaaaaaaaaaaaaaaaaaaaaaaaaaaaaaaaataagggggggtaaataataaaaaaaaaaaaaaaaaaaataatttaaaaaacaaaaaagtatttttactttttttttttggaggctaccaacaaaaaaccccccacccaaacagaatgtgtctggacgggcttatgacataactaaaaggaacagaaggaaatggatccttgtgtgggaggatggattctgtaattttttctgctgcgatccgcacaacatgaaaggacttcagccagagcttttctttaagattgtacatgagaactacaactatggccaaagctttattggaaaagttgcaagagatcacagccattaaatggtctacaatggagccccaggatcatgaagccaattcttgctttcatggaaca

SEQ ID NO: 5043 - DNA, 423 bp, Lilium asiatic
  Clone ID: LIB3230-034-P1-K1-F10
cggacgcgtgggtggttgcaaatgtacagtacatttgtatctggcaaaactagtcacaaagatgtccaggacaaaaattggcttttgatggcatattaccggcatcgctatttcatggcattttgttgtgtgggatctgaggtgctttacatcatcctctttcttgttcatgataacaaatcggaacatctcatcacggtgtgtcttaatactttaaaagggaatctaggccttcctttggtgacgaatcttgccctttctttggtattctccttggctctttgtggatgggcgattaagcaaataatcaatgtcatacagatgaaatcagcggcagatgcctgtgttctttacgatatgaaaagatcagagtgactcgaagtccctcacccagattatcattcctcgcctattgaaagtcat

SEQ ID NO: 5044 - DNA, 234 bp, Lilium asiatic
  Clone ID: LIB3230-034-P1-K1-F11
ccctctcatggtttggatcgaaataacgggcgatagaataactgcccttgacgaggcagatatcccatgtgggaagactgactcacgatctgtactgtctgacacctatgtcttcttcagatgtttactgaagcatattgagggtttgagctcatacgatttgtactgtgtcacaaagagcacgaacgagtacgtacttggagtgaggagcagtatattaccaagtgaccctgg

SEQ ID NO: 5045 - DNA, 424 bp, Lilium asiatic
  Clone ID: LIB3230-034-P1-K1-F3
cgagaatcctcctcccgccgatttcgaggatggagatcatccgttgtttgttacttggaagaaagtaatcaatggtggggagcctcgtctacgtggttgcattggaactttagaggctcgaggcctgatcactggttttcgggattatgcattaaccagtgctctaaaggatcgtcgtttctccccaattcaggccaaggaattgcaacaattggaatgtaccgtttctatactaactgattatgagtccgctcagaactaccttgattgggaggtgggaaaacatggtctgatcattgaattcactgatcctgactacaatacaaggcgcagtgcaacatatttgccagaggtggctgcccaggaagggtggactaagctggagaccattgactcgctgatgaggaaggcaggctacaatggt

SEQ ID NO: 5046 - DNA, 427 bp, Lilium asiatic
  Clone ID: LIB3230-034-P1-K1-F4
gctgtctccgtcggtgccaacatctccggcggccacgtcaacccggccgtcaccttcggtgccttccttggcggcaacatcaccctcatccgcggcatcctctactggatcgcccagctcctcggctccaccgtcgcctgcttactcctccgctacaccaccggcctccccaccggtaccttcgcccttgttgagggagtcagcgtctggaacggcctggtacttgaaatcgtcatgactttcggactggtctacactgtctacgccaccgctatagacccgaagaagggtagcattggtaccattgccccaatcgccattggtttcatcgtcggcgctaacattcttatcggtggggcgttcagtggtgcctcgatgaacccggccatcgcttttggcccggcattggttagctggagctgggcga

SEQ ID NO: 5047 - DNA, 404 bp, Lilium asiatic
  Clone ID: LIB3230-034-P1-K1-F5
gttaatatcaaaggaattcattggtgagataaatgaaaaaattacatatatcaaaagaaacttgtttgtgtaatgaagtggtataagttgtaataaaaattaaaaaaggattacttcatatgatgataactagataaaaatgaagaaaaacttataatgtataaaaatgtaagtatgttaagataatttttgggtaagaatgaaccacaatttttgtaacttctcctttttccttcaaattcttttcattcccgatttatatatcaaagaaacaactgaaaataactgaaatgaagttaatgaacaactgaaatgaagttaagtgcaaaataaatcagtccttatagtgtgagttgggcctcatatttccgattatttttttggacgtatatgtttccatccca

SEQ ID NO: 5048 - DNA, 422 bp, Lilium asiatic
  Clone ID: LIB3230-034-P1-K1-F7
ctagcaacgatacaaaattgaaactcttgatcctgcacttcttcgtcctggtcggagtgataggaaaatagaatttccacttccagatattaaaacaagacgacgcattttccagatacatacatccagaatgacattgtcagctgatgttaacctggaagagtttgttatgactaatgatgagttttctggggctgatatcaaggctatctgttctgaagctggcttgcttgctctaagagagcgaagaatgaaggtaactcacacagattttaagaaggccaaggaaaaagttatgttcaagaaaatagaaggggtaccggatggactctatatgtgagaagatcatgtaattcttactgctggtcttcttgtcagataagaggggtttgatgcttacggtccttttgaactttgtcact

SEQ ID NO: 5049 - DNA, 402 bp, Lilium asiatic
  Clone ID: LIB3230-034-P1-K1-G1
gcgcaggtcaaaagcaggttggaagcatgcctgacgatgccgcacttagtaaagtaatattatcataggacccagcactagatcctcacatatagcttttgtatggcaaactgctgaatcaggtaatgtgatagtgcagactaaaggatgctgcttgaacgcgtgaacaggataatgtttcaaatatcaacatgtactacattgacaacaccatatgacacaggggggaccaatacgctgtctcgagtcatgatagattgtttgtatgccacctcgggtctcatgatgcacgattcatagaaatggtaccggcataaactgtatttactgagaggtctgcctgccaacagagatatttttttaggaagatacctagtggtatacttcggtgatctatttatg

SEQ ID NO: 5050 - DNA, 421 bp, Lilium asiatic
  Clone ID: LIB3230-034-P1-K1-G11
ggaacttactatgaatccactgatttctgccgcttccgttattgctgctggattggccgtagggcttgcttccattggacctggagttggccaaggtactgctgcgggccaagctgtagaaggtattgcgagacaaccagaagcggaaggtaaaatacgaggtactttattgcttagtctagcttttatggaagctttaacaatttacggactggtcgtggcattagcacttttatttgcaaatacttttgtttaatttaatcctaaaattagaaatgtgaaaacgtacgttatgcgcttctttcttagtcttagtttattttattaacttggacttgccgtttgcttcttctaattatatcaacactttaatcctaacaattacttatgagacaataccctggaaagggcttattttgag

SEQ ID NO: 5051 - DNA, 67 bp, Lilium asiatic
  Clone ID: LIB3230-034-P1-K1-G4
cccacgcgtccggttctagacggagcgccgctctgagatccagctacgtacgctgcatgcgacgtat

SEQ ID NO: 5052 - DNA, 428 bp, Lilium asiatic
  Clone ID: LIB3230-034-P1-K1-G5
ggccgctgcttctctcaaagcagactgtatatctgaacagccatgtgacctagagttgacgagttcgaatccgaaaacaccttctctccccattcaagtgtaagtctgtatatctgagccaccttggtaccccacattggtgggagcctcatgcgttgggttgccctttatcccttttgtacctcaattttatagggaaacatgcgtcaatcaaccagttggtcgtccactaatctacactagcattctgggcacaataacccttttgtacctcaattttagaggaaatcaggccatcagcctggtcatccactaatctacacaagcactttgaggcctccacctagtaggtgagccaaagtggaatgaaggtttttgatattggctgtcatatatcgctgtcctctgacctggaaatccgtcatgcc

SEQ ID NO: 5053 - DNA, 420 bp, Lilium asiatic
  Clone ID: LIB3230-034-P1-K1-G8
gggctactatcacttgggacatagtggtggggggatgggatgttgagtatggtgctgaatttgtgccgactgcggaagggagctacacgattgcggtggagaagatgaggaggattccggtgacgacggaggagccggtgcacaatgtgtttactaccagggaggcggggaagatggtgttgtctgttgacaacacttgttcacggcggcgtaaggtggcggcgtaccggtacttcgtgaggaaatctcctgtttgaaagtttgtgtttggtagcacatctagtgcttgatatttggtctttgcgagtagtggttaagataatattaatgtgtaactaagataagtgaaagtgtaggttttgatgaagagacttgtctttagtggtcgtttgaatgagggggtcgttgaatgagtcaatt

SEQ ID NO: 5054 - DNA, 426 bp, Lilium asiatic
  Clone ID: LIB3230-034-P1-K1-H11
acgcaaagctcgaatctctcatcaatcatgtcaggccgcggcaagggagggaaggggctcggcaagggcggcgccaagcgccatcgcaaggtgctgcgggacaacatccagggcatcaccaagccggcaatccggcgcctggctcggcggggcggagtgaagaggatcagcggccttatctacgaggagacccgaggcgtgctgaagatatttctggagaacgtcattcgcgatgccgtcacctacactgagcacgcgcgccgtaagacggtgacggctatggatgtggtgtatgctctcaagcgccagggccgtaccctttatggctttgggggttgatcttgttctgtttatccggatctttgtttgttcgttttggatggtaatttgggttgtggatcattgtatttcatgtatctcatatta

SEQ ID NO: 5055 - DNA, 307 bp, Lilium asiatic
  unsure (1)..(307): unsure at all n locations
  Clone ID: LIB3230-034-P1-K1-H12
aaaaaccaaaaaancaacccacagaacaaaaagaaacaaaaaaaaaaaaaacaaaaacacaaacaaaaaaaaaaaaaaaaaaaaaaaacaaaaaaaaagaaaaaaaaaaaacaaaaaacaaacacacaaaaaaaaaaaaaagaaaaaaaaaaaacaaaaaaaaaaaacaagaaaaaaaaccacaaaaaaaaaaaaaccaaaaaaaaaaaaaaaaaaagaaaaacaagaaaaaacaaaaaaaaaaaaaaaaaaaaaaacaaaaaacaaaacaaacacaaaaaaaaaaaaaaaaaaaacgaaacaaaaa

SEQ ID NO: 5056 - DNA, 394 bp, Lilium asiatic
  Clone ID: LIB3230-034-P1-K1-H4
gcacctatgattggtactgaagatcggattctgaacagatgggctcaagttgcaaaaaagtggagctttcttccgctcattggtgatggatctacaaagatccaaccagtttatgttatagatgtggctggtgctattatggcttcattgaaggatgacggtaccagcatgggaaaggtctatgagctcggcgggcctgatgtttttaccgtacatcaactggcagatgtgatgtatgagacaattcgtgagtggccgcgttatgtgaaggttccttttcccattgcaagggcgattgcatcacctcgcgaattcttgctaaacaaattgccgtgtccattaccaattcctgagatattcaatctggaccaaatcaacgcacagtctgtcgata

SEQ ID NO: 5057 - DNA, 234 bp, Lilium asiatic
  Clone ID: LIB3230-034-P1-K1-H5
tcgcaagagaaagagaagacttacaaaaggttgagagaggagaacgaattcgcgcacaagatcgaggaagagaaggcattgaagcaacttgggagaaccatggtgccacatgctcggcccgttccgaagtttgacaggccattccgaccacaaaaatcgaccaaacaagtggcaaggcccgaagtgccacaacttcaagtggattaaccaagggccaagaagcacccctttatc

SEQ ID NO: 5058 - DNA, 416 bp, Lilium asiatic
  Clone ID: LIB3230-034-P1-K1-H8
cagcttctcaagttgaatggcgaggaagagaagcttctcgggaaagctatatgcgctggttgggctgatagagttgccaagcgcgtccgcacggtttcaaaatcatcggaagaggatggaaaggtgcgtgctggtcgttacaactcatgtgcctcagatgatcctgtatatctccatcgctggtcttcagtttctcatttagctccagaatttcttgtctacactgaacttcttcaaacaaaaagactgtatatgcatggagctacactggtcaatccagagtggctcattaagtattctgctcctctctgtaccttctcagcaccacttactgatccaaagccttattatgatgctcaaagcgaccaagtcttatgctgggttagggctactttcggtcgacataattggcaact

SEQ ID NO: 5059 - DNA, 220 bp, Lilium asiatic
  Clone ID: LIB3230-035-P1-K1-A1
atcctcctctcgccggaccagatcaagtattgctccaatgccctagccgagctcaagaacaagctcctaaacccttgcaagatctcccgggagtttgcccgcctagagggcatgatgccaacgaatgatgatcttttgagaacatatgaagtggctattaaagcttgcaattgaaacaaaaattgctatacagacgtcttgtcattcgacaactccagag

SEQ ID NO: 5060 - DNA, 379 bp, Lilium asiatic
  Clone ID: LIB3230-035-P1-K1-A10
attcacgccatgcatgaggagcgatgttcatagcatggggatgagttcacatcattgccatgactggcatttgaacttcacatgttctaaaatacagcaagtctcccactcatcataattggattaattcgattactaatgaacattccggctgaccgaccataatatattggtagcatatggtgggttgctgattcaagattcaaagttttccctactatttccggttctctggagttaaacctggtgtgcaagatgtgtagcatacctcagggattagactctctcattgaccgtttcactacctttgtcatggaccgtttcactaccctctgtcataaaacagacgtttcacaatgtcttaccagttagcttaata

SEQ ID NO: 5061 - DNA, 395 bp, Lilium asiatic
  Clone ID: LIB3230-035-P1-K1-A2
cgcccgcacgcaccagtccggaatgaccgcactgcgtccaatcctcctctggccggaccagctcaagtattgctccgatgccctcgccgtgctcaagaacaagctccgaaaccccttcaagatctcccgggagtttgcccgcctcgagggcatgatgccaaggaatgatgatctcttgagaacatgtggggtggctcttaaagctgccaattcaaacaaaaatcgctatacagacgtcttgccattcgacaactccagagttgtccttaactcaaccaaggagggcaactcatcaggaaatggctacataaacgcaagtttcatcaagattccttccatcagtaatttttcaagttttgtggcaactcaaggttcacttcaagagacctttgaag

SEQ ID NO: 5062 - DNA, 400 bp, Lilium asiatic
  Clone ID: LIB3230-035-P1-K1-A6
gtttaaacaagctgaagacactgctacaaaacttgatttggatggactcatagttatcgggggagatgactccaatacaaatgcgtgccttcttgctgagaacttcaggctaaagaatatgaaagcccgcgttattggatgcccgaagacaattgatggagatttgaaatgcaaggaggtcccaataagttttgggttcgacacagcttgcaagatttatgcagaaatgataggaaatgtcatgacagatgctcgttcaactggaaaatattatcactttgtaagacttatgggccgatctgcttctcacatcaccttggagtgtgctctgcaaacacacccaaacattaccgtaattggagaagaggttgcagcaaagaagcaaacactgaaaaatgtt

SEQ ID NO: 5063 - DNA, 268 bp, Lilium asiatic
  Clone ID: LIB3230-035-P1-K1-A7
ctgacgcgtggacctaaacttttggtattatgcgctcgtggttactcaagaacaagctgcgaaaccccttcaagatctccagggtgtttgcccgactcgagggcatgaagccctggaatgatgatctcttcagaacatgtggggtggctcttaaagttgtcaattcaaacaaaaattactgtacatacgtaaggtcattcgacaacttcagagttgactctaactcaaccaaggagggcaattcatcaggaaatggctacataaactc

SEQ ID NO: 5064 - DNA, 79 bp, Lilium asiatic
  Clone ID: LIB3230-035-P1-K1-A8
tccgaggacgcgagggcggtacacattgggacattagctgttaagtgtttatgagaaccaagttgttttgaggatgttt

SEQ ID NO: 5065 - DNA, 97 bp, Lilium asiatic
  Clone ID: LIB3230-035-P1-K1-A9
accatggtaacctccagaagcgttttgggatcacagaggggctctggattctgatccacattttccttgaaaagggtggggtcccaaaaagggcctt

SEQ ID NO: 5066 - DNA, 402 bp, Lilium asiatic
  Clone ID: LIB3230-035-P1-K1-B1
accatggtaacctccagaagcgtcttgggatcacagcggggctctgcatcctgatccagcatgtccctgaaaagggtggggaccgatacgaggccatctacagtttctattttggggactacggccacatatcggtgcaggggccatacctcacctacgaggaatcatacctcgcggtgaccggcggttctggcgtcttcgagggtgtttacggccatgtcaagctgcaacagctagtctttcccttcaagctgttctacaccttctacctcaagggcattcccgacctcccgccggagctgctaggcgaccacattcctccctcctcagcagtcgagcccattcccgctgccaagtcctgtgagccccatgccgcgctaaagaatttcacagattgatgat

SEQ ID NO: 5067 - DNA, 224 bp, Lilium asiatic
  Clone ID: LIB3230-035-P1-K1-B11
tcggaccgtcctgttcaattttactatcaaaaagctttaattcaaattgacgcacctacgtggaccttacaacacgcccataaagcttgatctggcatctgggaggctttcttgggagacttgggagactgcctgggagatatatgatgcatcaaaatcaccctcctcaagagtgttcttggggagcaagaccggattgttgttgggtactgataccgccattg

SEQ ID NO: 5068 - DNA, 403 bp, Lilium asiatic
  Clone ID: LIB3230-035-P1-K1-B2
accctctccgccgcatcagcaaatcgctatggcgctacccggccagcagaccgtcgagtaccccaacttcaaacttgtcctcgtcggtgatggcggcacagggaagacgacattcgtcaaacgtcatctgactggtgaattcgagaagaaatatgaaccaactattggtgttgaggtgcatcctctggatttcttcaccaattgcgggaagatcaggttctactgctgggacactgctggtcaggagaagtttggtgggctgcgcgatggctattacatccatggtcagtgtgcaatcatcatgtttgatgttactgcacgccttacctacaagaatgttcctacttggcatagagatctttgccgagtatgtgagaacattccgattgtgctttgtggcaac

SEQ ID NO: 5069 - DNA, 174 bp, Lilium asiatic
  Clone ID: LIB3230-035-P1-K1-B3
atccgcttcgtcagtgagataataggtatggctctactcggccagcatagctggggaataggcaactttaaacttgttagattcgatgatggcggaccagggaagaggacatgaggtaaaggatatctgattggtggagagcatacgaagtatgtactaactattggtgttgaa

SEQ ID NO: 5070 - DNA, 290 bp, Lilium asiatic
  Clone ID: LIB3230-035-P1-K1-B4
cgccgccgtcgcaggcacggttcggcttcgagatcaaggaggtgggcatgaccagccgctacgcgtccgctgaggatctgcaccagatggacagcgaccaggaagagggtgctgagggtggcgatgacggtgacagcagttgcccacacgccatcgacatgcaggcggaggagttcatcaccaagttctatgagcagttcaagtcagaatcgttcaacggccgtgcctccgagtgatccattgatccatccgcttgcggcatgtatgtaatcgttctgatcttacaccga

SEQ ID NO: 5071 - DNA, 311 bp, Lilium asiatic
  Clone ID: LIB3230-035-P1-K1-B5
gaagctttgaaagctaaaggcgtgtctgcgattggggctgctggattttgttggggtgccaaggtagttgccagcttggctaagtttgatgaccttaaagctgcagtgatgttgcatccttcaagggtcacggtagaggatgtcaaagagattaaagtaccgctcgccgttcttggagcggaaattgacaagagctcccctcctgagctactaaagcagttagaagaggttttatttgccagacctgagattgatggatatgtgaagatctttcctggagttactcatggatggacttgtagatacgatac

SEQ ID NO: 5072 - DNA, 97 bp, Lilium asiatic
  Clone ID: LIB3230-035-P1-K1-B6
gacgctctgaaagctaaaggcttgttttcgattggagctgcttgattttgattgaggtgccaaggtagctgtcagcttgtctaatattcgatacctt

SEQ ID NO: 5073 - DNA, 378 bp, Lilium asiatic
  Clone ID: LIB3230-035-P1-K1-B7
gcaccgtcaagcccgatgacaagctgggggctaagcggaagggcgccgacaaggtgagcaggcaggtgaagcgtgccaaggctggcaaggaccccaacgcgccgaagcgtcctccgaccgcgttcttcatcttcatggatgatttccgcacggagtttaaggagaagaacccgaacaacaaatctgtggccactgtgagcaaagctgggggtgacaagtggaaatcaatgtctgatgctgagaaggcaccctaccaggccaaatctgaaaagcggaagactgagtacaacctgaagatggatgcttacaacaagaagcttgactgagatgctgagggtgaggagtcagacaagtccaagtctgaagttcatgatgagg

SEQ ID NO: 5074 - DNA, 149 bp, Lilium asiatic
  Clone ID: LIB3230-035-P1-K1-B8
ggcaagaggaggtgcaggccttggtgttactcggactgtgttggtgcgcaagtgggacttttgatgatcaatgctcacaaaaacgtgtgaaagatgtaaactcccttcgatagagcatatgaattctggggagagcacactcatgcata

SEQ ID NO: 5075 - DNA, 388 bp, Lilium asiatic
  Clone ID: LIB3230-035-P1-K1-B9
ggcaagaggaggtgcggcgctgtaggtagctcgaactgtattggtgcacaggtgagactctccatgaccaatgctcacaatcacgtcagagagatgtaaactccctccgattgagcatctgagtagtgaggggagcacactcaggcatcaagtcgaagaacttgtagacttcttggcgctcatgacaagcaacccagtcattgtaggtgtaggtggactgaggaccatacttcatgactcgcagctcaatccgacaaagcttcatgcggtcgaggtgctccaagtatgtggtgttggcacgcttgtctgtccatatctggttgtagagatgcgctgccgagcgtcgaagtgcttcgtgaagcgcttgttaagacgagtccacatggtt

SEQ ID NO: 5076 - DNA, 377 bp, Lilium asiatic
  Clone ID: LIB3230-035-P1-K1-C1
aaatcctggactcacaactgtcgccattctacattatagtaactctggtgggaaacccattggttcaccaccaggaggaccaactattcagattggttggtctcttaaccaggcgagatctattctgtggaatctatcggctagcggtccaagaccaaatccacaaggatcatatcattttggaatgattaacaccttccgtacaattatgcttgcaaacttggccgctttcattaatggcaagcacagatatgctgcgaacagtgtttcatttcattccagctggtacttcgctgaaaattggcgaatatttcaagacttcaggagttgtctcacttggaaggattttttaattatccctcactctgtgggggctt

SEQ ID NO: 5077 - DNA, 384 bp, Lilium asiatic
  Clone ID: LIB3230-035-P1-K1-C10
cggacgcgtgggcgcgaggctgatgttgatggcgatggtcagatcaactacgaggagtttgtcaaagtcatgatggccaagtaaaatttgactggttgattactagtatgatgcgattctcctttctctattacctggtagtaatctggaattagatgtagttgtgaaatcagaaaagaggatgatagtatcatgtactctctcgctctctctgttggttgtgtttcatctctgtttatcggggattgttgcctgttatcctttcggtgtgattgggatccaagttctatatttagtcctgtttattattttgttatattttctgacattggaagtttagtgatgttcggagacatgaagttcttgtgattaatgacatggaaa

SEQ ID NO: 5078 - DNA, 293 bp, Lilium asiatic
  Clone ID: LIB3230-035-P1-K1-C11
aggacatgccgggaggtgctcaaagggtgcagtgtgctcagcagtaaggagatgatgatgatagctggatgtttaggatctgaatatgctgtcagttaacttttatccactctatatttttatggtatatcataattgtcaccttgttcagtcgttacagatctgaacttgtaacttcttgcttaagactatcttggttttataagtttggtattctgaaaattcttgctgtgtcacagttgtgatgatgcattgtgataatgcaatagtgtgtttgcttgcgaaacataata

SEQ ID NO: 5079 - DNA, 389 bp, Lilium asiatic
  Clone ID: LIB3230-035-P1-K1-C12
ttcacatttttctgcccattttttatgccgtgttgtacctagctagtattaggttattcaagtatatttagtattattggccataaaagagatttattagtgaatgcttctaaatcttccaagaatctcatatggggagttgaatgcacttggcatcagattgtcgttctgtcatatggtaacttacattgcaatcatatcgtgttgttatagttctttttcacgtgacacaaacatttggccataacgtaagacaaacatgattgatacttcgtagcatatgttctcgttttatttacacattacatgttaattgctgtaattaggtctttgattttgggagaataatctttaactgaggtcctgacgtctttggagaggtgccaaag

SEQ ID NO: 5080 - DNA, 313 bp, Lilium asiatic
  Clone ID: LIB3230-035-P1-K1-C3
atgctaagcttggagagggactgtggttcactattggaggtcaacatattccttttggggcgtcgtcacaagacttgtggacagaattgggccgtccttgtgcgatccatcaaaagcaggttgaccaaatggtgattcactccacatcagacgtgcgtcctagaacaactcattgtggggattacttctacaactactactctcgtggtctggacatattatatgatgggcagactcatagagtcaaaaagtttgtgttgcacacaaacattcctgggcattcagaacttaatatttacacaaagcagttttt

SEQ ID NO: 5081 - DNA, 402 bp, Lilium asiatic
  unsure (1)..(402): unsure at all n locations
  Clone ID: LIB3230-035-P1-K1-C4
ctaccatctcacccctctcctcctcctcctctgcggcgtctgcgccgcagccaccgcccgctccaccgccatctctcttctcaaggccaatgatgacaaccaatgtgtctacaccctgttcgtccgcaccggctcgatcttgaaagctggcacggactccatcatcagcatcgaccttttcgaccgggatggcaacggcatcggaatccccaacctggaggcgtggggcgggttgatgggagctgattacaactacttcgagaggggcaatctcgacatcttcagcggccggggaccctgcctgtctttgacgccatgctccatcaatgtcacctccgacggcaccggngcataccatggttggtactgcaactacatcgaactcacagtgacgggtccgca

SEQ ID NO: 5082 - DNA, 402 bp, Lilium asiatic
  Clone ID: LIB3230-035-P1-K1-C5
cggacgcgtgggtcttggtacgaatattgccgatcacgttcctgagacgccaaataaagtttctgaaagtatggttagatgcatgggtgccatatatcacaagctttcagacccctctttggtacatcaaggtcatccgtgttcacctacgtcatcgttcacatcaatgagcgagctatctccacggtgtacgggagatgtttggagtcctcattatcaaagggaatctactctcgatgcacgacttataaatcctttctgtgtagaaggggtaaaagagttcagtggaccttataatacaatggtggaagtgcctcttatttgtagggacaattggaggatgcgtgatgttaatgacatgctacaaaattatgagtcacttgttcgtagattggaaagaat

SEQ ID NO: 5083 - DNA, 254 bp, Lilium asiatic
  Clone ID: LIB3230-035-P1-K1-C6
cgcgctcgtggacctaacggcgagtattcaaaggtagctgcgtgatactcctaaggaaatgagggagatagctggatgattaagatctgcaacatatcacaagcaactataccccactctgtaacatcaaggttatacgtaataccaccttgttcagtcacatcagagatcgacgctgtactacttgcttcagactatgttgggtgtataaattaggaattctgaaaatttttgctggcacacatttgagatga

SEQ ID NO: 5084 - DNA, 400 bp, Lilium asiatic
  Clone ID: LIB3230-035-P1-K1-C7
aaatcctgttctcacaactgtcgccattctacattatagtaactctggtggaaaacccattggttcaccaccaggaggaccaactattcagattgattggtctctcaaccaggcgagatctattcgatggaatctatcggctagcggtccaagaccaaatccacaaggatcatatcattatggaatgattaacacctcccgaacaattaggcttgcaaactcggcagcttacatcaatggcaagcagagatatgctgtgaacagtgtatcattcattccagctgatactccgctgaaaattgcagattatttcaagattccaggagttttctcacttggaagtatttctgataatccgacatttggcggtgcttatttacagacatctgtgatggaagct

SEQ ID NO: 5085 - DNA, 112 bp, Lilium asiatic
  Clone ID: LIB3230-035-P1-K1-C8
agctatcatagatccttgatcataaatcccacacaatttgtgcctctgcagagaactgtaaatggaactgtcccttgcaatatgcaacttctgagcatgcatttagatatgg

SEQ ID NO: 5086 - DNA, 400 bp, Lilium asiatic
  Clone ID: LIB3230-035-P1-K1-C9
ggagtacaaggagccggaaactaaagcatgacgttattgaggccatcaacttacttattcaagatatagatacatgccatgaacaaatttctgaacaagcagtggagcatattcaccaaaatgaggtcatattaactttaggccgctcaaggacagtcaaagagttcctctgtgccgcaaaagagaaaaagcgatcatttcgagtatttgttgcagagggtgctccaaggtaccagggacatgttttggcaaaagaactggtcgccaaaggtctacaaaccactgttataactgattctgcagtttttgctatgatttctcgagtgaatatggtgattgttggagctcatgctattatggcaaatggaggggtgatagcacctgttgggataaatatggt

SEQ ID NO: 5087 - DNA, 400 bp, Lilium asiatic
  Clone ID: LIB3230-035-P1-K1-D1
gcaagatcgacatcctctccaaccttggatatgcggaaccaagcatgctactcattctcgtatttctcctaaatgcctcactgctgaagagggactcgggagtgttaagcaaacggtggaacgtaaggaccatatgtaatgttatcctcaactgcatccagatttttgtcctgcaaatggctatcgtttttgctggtcccagattcaattgcgatatgagtgatgggggaacgaagatcgccaagtacttcacaagaatctcctctttgaccaaagacagcagggtatgcacttatcccttgcttacaactatcgttctaggcgcattctatgccctcctcatcagctatgtaacatatgttggaacttgtatgctgactctggagattaataagggact

SEQ ID NO: 5088 - DNA, 345 bp, Lilium asiatic
  Clone ID: LIB3230-035-P1-K1-D10
gtgaatgagttattacaatgcccaatttgctcacactccatgtaccccccaattcttcagtgcttgaacggccacactatttgttcacagcgcaagcagaaaatgagtaattgttgcccgacttgcaatcaggagcttggaaacataaggtgcttagctttggagaaaatggcagaattattagaggttccgtgtaggcatcacactactggttgcgctgagatgatgccctactatttcaagcaaaaacactgaggcctctgtcggttccgaccatatggttgcccttacgcctgttccgagtgctcagtttcaggagacatttctagccttagtgcacatttg

SEQ ID NO: 5089 - DNA, 340 bp, Lilium asiatic
  Clone ID: LIB3230-035-P1-K1-D12
ggcttatattgatgacggctatcgtcagacacatgaaagggctcccccatcttaccaagagggtgaccgggagtaccctccaatctctcgacccaaacgtccatactcagacttggatgtgcctcgatactctagtgtgaatgcgcgccaaaatagggcccgtttggactatgaggttgcaggcagcacatctcatgttactgaaactaatgttgacagactcgatcgatatggtagtcgtcgttcactttttgatcaggatggtttatatagaatccggcatgccacatactacagtgaagggtctttgcctggtaatgttggcagaggattatacttc

SEQ ID NO: 5090 - DNA, 405 bp, Lilium asiatic
  Clone ID: LIB3230-035-P1-K1-D3
gttggtatgagaccgtctcttcagctcttgcagtgaggtttcctggcaaggctgctggagtgaatattggtggacaagttccaccgtcggaacctgcaccttcgtctgaggctacaaaggtggtggccgaagaagatgatgatgatttggatctctttggtgatgagactgaggaggagaagaaggcagctgaggagagggaggctgctgtcaaagcatcctctaaaaagaaagagagtggcaagtcctctgtcctattggaggtgaagccatgggatgatgagactgacatgaagaagttggaagcagcagtccgcagcattgaaatgcctggtctcttatggggtgcatcaaagcttgtagaagtaggttatggtattaagaagctgcagatcatgatgacta

SEQ ID NO: 5091 - DNA, 284 bp, Lilium asiatic
  Clone ID: LIB3230-035-P1-K1-D4
ctcccatagcaggcgtagcgatacgactcaatgtttgagagcatgaaaagtctcggtagacttgatttgcatctgactgttcaggacagaaacctcctccagtgggctacacgaatgttgttgcggcttgcagagctatagggcgcatgatgttctctattgatcaaatggaggtatgaaaacggaatggtccaaatgttaaacttatcaacgcctattgccttaagcgggatgaagagctctctaacatatgctatggtatactgactgttattgattagcat

SEQ ID NO: 5092 - DNA, 86 bp, Lilium asiatic
  Clone ID: LIB3230-035-P1-K1-D6
cgtactcgtagagctaacgacgagtattctcgatcacgtactctgagactgccaaggtactatgtgaacggatagcttgacgaatg

SEQ ID NO: 5093 - DNA, 261 bp, Lilium asiatic
  Clone ID: LIB3230-035-P1-K1-E1
gcctgatctacatgctttacaaccttggatttgcagaaccaagcatgctactgatcctcatgtttctcctaaaggcctgactgctgtagagggactcgggagtgttaagcaaacggtggaacgtatggaccttatggtatgttatcctaaactgcatcccgatatttgttctgcaaatggctatcagttttagctgtacaagattaaattgctatttatagtgatggtggatacgaacattcgacaagtacttcacaagaa

SEQ ID NO: 5094 - DNA, 387 bp, Lilium asiatic
  Clone ID: LIB3230-035-P1-K1-E11
cggacgcgtggggttgatccaggtttatgagggtgagagaaccaggacccgtgacaacaatctcctcggtaaatttgagctttccggcatccctcctgctcctagaggtgtccctcagattactgtctgctttgatatcgatgccaatggtatcttgaatgtgtctgctgaggataaaactactgggcagaagaacaagatcaccatcaccaatgacaagggcaggctcagcaaggaggagatagagaagatggttcaagaggcggagaagtacaagtctgaagatgaagagcataacaagaaggttgaggcgaagaatgctcttgagaactactcctacaacatgaggaacaccaattaggatgacaagattgcgttcaagctacc

SEQ ID NO: 5095 - DNA, 323 bp, Lilium asiatic
  Clone ID: LIB3230-035-P1-K1-E12
cggacgcgtgggcggacgcgtgggtgttacggggtcgagtcttgaccgctcttgctaaatttgggcatgaagatacaataaacgaagcattaaggcggtttgatgcctacctgagtgataaaaatacaccccatctccctcccgatacaagaaagggtgcatatgttgctgtggtgcgaggtgtcactgcctacaataaatcgggatatgaatctcttttaaagatttacagagagaccgatttaagccaggaaaaagaatgtgttttgggtgttatagcagtattgtctgatccaattgttgttcgtgaagctctggatttt

SEQ ID NO: 5096 - DNA, 181 bp, Lilium asiatic
  Clone ID: LIB3230-035-P1-K1-E2
accagatctacatcctgtacaatcttgtattcgcagaaccaatcttgatactgattcaggtggttcttctaaaggtctgattcctgaacagggactcggacgtgttaaacaaatggttcaacgtccggaccttgttttatgttatattcaacagcatcccgaaatcagttctgtaaatggc

SEQ ID NO: 5097 - DNA, 405 bp, Lilium asiatic
  Clone ID: LIB3230-035-P1-K1-E3
gttggtatgagaccgtgtcttcagctcttgcagtgaggtttcctggcaaggctgctggagtgaatattgatggacaagttccaccgtcggaacctgcaccttcgtctgaggctacaaaggtggtggccgaagaagatgattatgatttggatctctttggtgatgagactgatgaggagaagaacgcatctgacgagagggaggctgctgtcaaagcatcctctaaaaagaaagagagtggcaagtcctctgtcctattggaggcgaagccatgggatgatgagactgacatgaagaagttggaagcagccttccgtagcattgaaatgcctggtcttttatggggtgcatcaaagcttgtagaagaaggttatggtattaagaagctgcagatcatgatgacta

SEQ ID NO: 5098 - DNA, 397 bp, Lilium asiatic
  Clone ID: LIB3230-035-P1-K1-E5
cttcattgttcaccgaccactccctcgacagcaacgtccaccgacggcatgaagaagacttcctcttcgacaacgacggcagagctcctctctgccgtcaatcttcgtctacttcgtctgcatgcaagccaagaagccttcagaagaatccagtgaagcctcgagggccgtccgatcttcaaagctgctaaataaggtaagatctcaatagatttggtactgatgctatatttccttttgcagattttctcaagctataaaagagatccatctcaccgcagagaagatatacaaggctggaagcccggaagggttccagtggagtctctgttcacagtgagagagtgagattgagagttctagttgtaatgagagacattgtgatgtgagttgtgag

SEQ ID NO: 5099 - DNA, 159 bp, Lilium asiatic
  Clone ID: LIB3230-035-P1-K1-E6
gaagcagagaaagaaccatgtgcttcctcttatcttgctgttgcctgtactacttaccctctccaatgccgccgacttctgcgtcggcgacctcacagctgttgaggggcctgacggttacctctgcaagaagtctgtgagcgttcactactttttgtt

SEQ ID NO: 5100 - DNA, 398 bp, Lilium asiatic
  unsure (1)..(398): unsure at all n locations
  Clone ID: LIB3230-035-P1-K1-E7
cgttttggtacaatggaccacgacgacggtgaagttggtgatcggcgacgaaatccaactcaactcaatcgaagatcgtctcacccaatccggcgtccccgtccaaatcggcatcgtcgttgggaagctaatccccaactcagaccgcggctacgtctattctctgatccccacgtcgcagcggaaatcaggaaattggaggtgttccggtgcatggacgcctctgagacataaaaccgaacaccttccgtgcaacgctcctccaacaacaacggaaaaaattggtggattctaagcaatgggtatcgatttagtgccggcgctgacgaagatgaccgtggcgttngaccacgccaaggttgtcttcatcaccctcttcgtagctttgctctgcacgt

SEQ ID NO: 5101 - DNA, 182 bp, Lilium asiatic
  Clone ID: LIB3230-035-P1-K1-E8
tcggcaactgcgagagagacccttgctgcactttttcttaacaatggcgcgacgggacggggtttacgagaacaacggcggtaccttgcgtgcgattgccggtcttgactacatgttggtggtcggcgacacgaggctgtccgtcggattcagcatattacaccaaggactatttcaagatc

SEQ ID NO: 5102 - DNA, 396 bp, Lilium asiatic
  Clone ID: LIB3230-035-P1-K1-E9
gcaactgcgagagagacccgagcagcacttctcctcaacaatggcgcgacgggactgggtatacgagaacaacggcgggacctgcgtggcgatcgccggccttgactactgcgtggtggccgccgacacgaggctgtccgtcggatacagcatatacaccagggactattccaagatctgccagcttgctgacaaatcagtgctggcatcctctgggttccagggtgatataaaagctttgcagaaaaacttggcggctaagcacctgatctatcagcatcaacataacaaacagatgagctgccccgccatgggccagcttctctcaaataccctttactacaagcgtttcttcccgtactacgctttcaatgtgctaggcggccttgacagtga

SEQ ID NO: 5103 - DNA, 317 bp, Lilium asiatic
  Clone ID: LIB3230-035-P1-K1-F1
gcaagatcgacattgtgtccaaccttgtattcgcagaaccaagcatgctactgaggcgcgtgtttctcctaaatgcctcactgttgaacagggactcgggagtgttaagcaaacggtggaacgtaaggaccttatgttatgttatcctcaactgcatctagatactagtgcttgaaacgagatccgtctcttggggccccagattcaattgcgatcttagtgatgggggaacgaatatcgccaagtacttcataagaatctcctctttgaccaaagacagcagggtatgcacttattctttgattacaactctcttt

SEQ ID NO: 5104 - DNA, 380 bp, Lilium asiatic
  Clone ID: LIB3230-035-P1-K1-F10
gccaccaccactgccccggccgcctcctacccactcatgctaggcgggacgttcacagacatcgcaatctgggttttctaccccttcaatggcccagctaaggccaaggtcgagttcttcaacatcccactgggccgaattggcgagcatgtcggtgactgggaacacttaaacctccgtatacgcaacttctccggtgaactcgacagtctctacttctccgaacacagcacaagctcttgggttgatgcctcctagcttgagttttccactggtaacaagctagtagcctacgcttccttgaacggccacgcattagttttgtcacatctactggacattggtgccatcgacgaagaagtctgctaccgagttgtccg

SEQ ID NO: 5105 - DNA, 335 bp, Lilium asiatic
  Clone ID: LIB3230-035-P1-K1-F11
gccaaatcctcctccagaactacaacaaagctccgggactggcggtggtgatcgtcgggagccgcaaggactctcagacctacgtggcaatgaagcgcaaggcctgcgccgaggtcggcatccgctcgttcgatgtggatctccctgaggacatcgccgaggccgacataattgataaagtccaccagctgaacgccgatcccgacgtccacggaattctagttcaacttccgttgccaaaacatataaatgaagagaaagtcttgagtgaaatcaccattgaaaaagatgttgatggatttcattctcttaacattggcaagctcgcaatgaaa

SEQ ID NO: 5106 - DNA, 404 bp, Lilium asiatic
  Clone ID: LIB3230-035-P1-K1-F2
cggacgcgtgggcggacgcgtgggggacgccaggctctggttgttggcaggagggacgccctgtcggcctgtttcaccggcctcgctctctcggtcgccggtgcagccggcatctcacgtgctgcaatcctcgaggccgacgatgatgtggagctattggagaaggtgaaagaggaccggaagaagcggctggaaaggcaggctttcatcagctcctccgggaaagagacaggatacctccaggaccttgtatacaagctgagcagagtggggcaagctatcgacaacaacgatctttctgcagcgagctctgttctaggctcaagcactgatgcagactgggtgcagaaggttaatgcagctttcaacaagctaagctctagttcagaggagaagactgaagt

SEQ ID NO: 5107 - DNA, 350 bp, Lilium asiatic
  Clone ID: LIB3230-035-P1-K1-F3
cggacgcgtgggcggacgcgtgggggacgccaggctgtggttgttggcaggagggacgccctgtcggtctgtatcaccggcctcgctctctccgtcgccggtgcagccagcatatgacgtgctgcaatcctcgaggccaacgatgatgtggagctattggagaaggtgatagaggaccggaagaagcggctggaaaggcaggctttcatcagttcctccgggaaagagacaggatacctgcaggaccttgtatacaagctgagctgagtgtgtcaagctatcgacatcaacgatctttctgcagtgagctctgttctaggcttaagcactgatgcatactgggggcagaa

SEQ ID NO: 5108 - DNA, 345 bp, Lilium asiatic
  Clone ID: LIB3230-035-P1-K1-F4
ggcaccaccactgccccggccgccttctacccactcatgctaggcgggacgttcacagacatcgcaatctgggttttctaccccttcaatggcccagctaaggccaaggtcgagttcttcaacatcccactgggccgaattggcgagcatgtcggtgactgggaacacttaaacctacgtatacgcaacttctccggtgaactcgacagtctctactttttcgaacacagcacaagctcttgggttgatgcctgctagcttgagtttttcactggtaacaagctagtagcctaccctttcttgaacggccacgcattaattttgtcacatctactggacattggt

SEQ ID NO: 5109 - DNA, 397 bp, Lilium asiatic
  Clone ID: LIB3230-035-P1-K1-F5
gaaaaacgagaggttttaaaaagacaaggtcacggagagtatagggaggtaactgaaggagaatttctgggggaagttacgaaaagtgaaaaagcaatctgccatttcttccaccgcgagttctaccgttgcaagataatggacaagcatttgaaggctcttgcaccattgcacattgatacaaagttcatcacattggatgctgaaaatgctccattttttgtgacaaaactagcaatcaagaccctcccatgtgtcatattattcaggaatggtattggctttgatagaattgttgggtttcaagatctaggtggcaaagatgatttcaccaccaatgcgttggaaaatcttcttaaagaaaaggtatcatcaacgatagaaagagcaaagatga

SEQ ID NO: 5110 - DNA, 357 bp, Lilium asiatic
  Clone ID: LIB3230-035-P1-K1-F6
gccaaatcctacttcagaactacaacaaagcttttggtctggcggtggtgatcgttggtagccgcaaggtctctcatacctacgtggcaatgaagcgcaaggcctgcgccgaggttagcatccgctcgttcgatgtggatctctctgaggacattgcctaggccgacataattgataaagtttaccagctgaacgccgatccttacgttcactgaattctagttcaactttcgattgtcaaaacatataaatgaatagaaagtcttgagtgaaattaccattgaaaaagaagttgatggatttcatactcttaacattgactagcttgcaatgaaaggcaagaaagtcattattttt

SEQ ID NO: 5111 - DNA, 89 bp, Lilium asiatic
  Clone ID: LIB3230-035-P1-K1-F7
gtggcacttagatcgtgtatttagttttctctatgaggtgtctggggatgcctatgtgcgtcggtatagcagagcttgattcataggtg

SEQ ID NO: 5112 - DNA, 400 bp, Lilium asiatic
  Clone ID: LIB3230-035-P1-K1-F9
ggcggtggtctgcacctacactatctttgggcttgcttggttgtggaacgagacgtcgccgctcgggtggtggaccctcaagcctcgccccaaggaagagaaggagatggcacacttgtatgagcgcagaaaatttccatacccaggtgacactgaggctgtcgaagagttcattgcaagcgggggcgcccttggcaccaccatcggtcccaaagggattatcgactctggcgattctgacaacttccagaaacaactgcagtcgaagaaatttgatcaggaagctcagaagatgtggttccgcatgaggaacgaggttatatcggaacttcaagagaaaggtttcgatatcgagtgaaagtttgtgaagccaaagaaatgccaaactgctatattttgg

SEQ ID NO: 5113 - DNA, 398 bp, Lilium asiatic
  Clone ID: LIB3230-035-P1-K1-G1
tctagatcttgaaggaagagaggcgagaggagagaggagagagaaagagagcagcggaggagagagaaaatggccgtcgccgtagaaatccctcgcgagtatggctacgtcgtcatcgtcctcatcctttacgccttcctcaacctgtggatgggcatccaggtcggcaaggcccgcaagaagtataaagtgttctatccgactctctatgcagtcgaatcggagaacaaggaggccaagctcttcaattgtgttcagagagggcaccagaactcactgtagatgatgccagcattctttgtgatgctgctggtcggtggatttcagcacccactgatcggagcagcacttggcctgttgtataccgcggcaaggttcttctacttcaccggatatgc

SEQ ID NO: 5114 - DNA, 389 bp, Lilium asiatic
  Clone ID: LIB3230-035-P1-K1-G11
tgatgtttttgaaagcatgttaattgattctgattgggccattaacaatggtaactggctgcggctctcttgttcatcctttttttaccagtattatcgtgtctattcgccaataccttttgggaaaaagtatgatcccgctggaagatatatacgctattttctacctgttctgcacgatatgccgacggagtgtctatctgaaccttggactgcaccggttcaaactcaacacaatgcacattgcctaagtcaggagagattatcccatgccacgattgaagatgccggctctgttttctcaacaaaaaaattcacctgagaaatcagttgtagatcacgacaccgcacgcaaggaatgttggaggaagatgggcgaaacttaatca

SEQ ID NO: 5115 - DNA, 370 bp, Lilium asiatic
  Clone ID: LIB3230-035-P1-K1-G12
cacagtgttgggcggacgcactgcgtgaagctcgtgcaccgcctctacccggaagtagacccagagctgaacccggaccatgtaccacacatgttgaagaagtgtcacactgagatcccggacccgaaggcggtacagtacgtccgcaacgacaggggcacgccgatggtgctggacaacaactattaccgcaacatccttgacaacaaggggctcttgctggtcgaccaccagctcgcctatgataagcgcactcgcccatatgtgctgaaaatggcgaagagccaggagtacttcttcaaggagttcagcaggggcattaagattcttactgagaataaccccttgaccggtgaccagggagagatca

SEQ ID NO: 5116 - DNA, 398 bp, Lilium asiatic
  Clone ID: LIB3230-035-P1-K1-G2
ggtgtgatatccacaccagaggtgacagattggcatcctctatctaccaatgacagctatctggttgcttcatctgatggcatctttgagaaactgacaagccaggaagtctgtgatgtgctatgggatgagaaaataagagccagcatgaattcagaattcaattttaccgtcacacattctttggctgatataataataaaagctgcttttgaaaggggcagtatggacaacatgtcggttgtagttctacaactcccattggaaggaaatactggaaactttatgaaagatggcagtgctctagagggaagctcaattacatccccatttggactgcagcggatcattcaggaaaatttagtaatttaattccgtttggcgagtctacttggatt

SEQ ID NO: 5117 - DNA, 400 bp, Lilium asiatic
  Clone ID: LIB3230-035-P1-K1-G5
tactccccctcctttcatctacacataatcatagatggcagcagagagtgctgtttcgttcgttctgaacacggtcagtagcctcctagtccaagaagcctctctactggtcggtgttaaagacgaagtcgagtggttgcgcgaccagctggaatggatgaagtcctttctcaaagatgcctacaccaagcgccgacgaggagacgagcgagcaaagcagtgggagagggccgtccgagaagctgcttaccgagccgaggacataattgagtcctacatgatcgaaatcaatagccgccgtcagcaaccactcaggtgttgtgggattttgaagccagtagaaaggtacgctcgcgaactaaaattccgccacatactaggggctgatatcaaacaactc

SEQ ID NO: 5118 - DNA, 312 bp, Lilium asiatic
  Clone ID: LIB3230-035-P1-K1-G6
tccggaatgacccacgcgtccgacacgttcgtgaagtttatgaaagaatgttaatggattgtgattgggccagcaacaatgggaactggctgtagctctattgttcatcctattattaccagcattagtgtgtatatacaccaataacaattgggaaaaagtatgatcccgatggaagatatatacattattttttacctgttctgaaggatatgccgaaggagtatatatatgaaccatgaactgtactgtttaaaattcaacaaaatgcaaatagcataatagggagagaatatcctatgctatgaatga

SEQ ID NO: 5119 - DNA, 374 bp, Lilium asiatic
  Clone ID: LIB3230-035-P1-K1-G9
gaaaacaggcgacgatggatcgactgcaccggatcttctcaggcgccggcgggatgggcggcatgggccacccgccgtccgacgcgccgctcctcgactcgtcggagcaggtttacatctcctcactcgccctcctcaagatgctcaaacacggcagggcgggtgttccaatggaggtgatggggttgatgcttggggaatttgttgatgagtacacagtgagggtggttgatgtgtttgcgatgccgcagagcgggacgggcgtcagcgtcgaggctgttgatcatgttttccagacaaacatgcttgatatgctgaagcagactggaaggccggagatggttgttgggtggtaccactcacatccaggcttt

SEQ ID NO: 5120 - DNA, 271 bp, Lilium asiatic
  unsure (1)..(271): unsure at all n locations
  Clone ID: LIB3230-035-P1-K1-H1
accagatctacatactctccaaccttggattcgcagaaccaatcatgctactcatccttgatgtgcttcaaaatgcctcactgctcaagagggactaggtagtgttattcaaacgagtgtacgttaggacaatatgccttgtttattctcaactgcatccgnnnttttgacctgtaaatggctatcggttttgatggtcccagaaacagttttcaataatagtgattggggaacgaaaatctttcatgtacattatatgaatctgcttttt

SEQ ID NO: 5121 - DNA, 418 bp, Lilium asiatic
  Clone ID: LIB3230-035-P1-K1-H10
caggcgatcccacgcgcgcggggctacgggacaccagttctacgggggagacgaactttatcggtgctttctctcaccgccggcctttcggcgtcgccgcctacgttaccccgccgccctttcgccatcgccgccgcagtcgccaccggattcggtgccctttccgacggtagcggagaaaccctagatcggagaatatctggaccacactccataagataaatggatctggagacagagaaccggcttgctgccttgctgatggaagaggcaaggaaagcccgcattcaagctgacaaagaaggtgttcatgcctatcttcagaagcctaatgtaagggctcgccctaattcacgcttcctcactgctactggtctcggggtgcaacaagcaaatcgagttgtggaggtcagtgaat

SEQ ID NO: 5122 - DNA, 398 bp, Lilium asiatic
  Clone ID: LIB3230-035-P1-K1-H12
cgcagagagcatgaagatacttcggttaatataatgagctcagtctatgtccaacaacaacctttcggttcgtacgagggtccctccacaaaacttgagtcatatgagaaatccacggtgaatctagcttaagcacaaacaattaactgagattagattaaggcaaagttgtggagcaacataaacaaatatcaaagtaagacagagagatccatggcagatgttatgaaattatgttatgtaattgggactaattcaccactaacaatttgaatctctagaaattgtgtagtctgatgtgttcatcaaaagagtggtatcgcatgtaatatgataagagcaaccagaatcaaagatttagggatgaaatataccaagcaatatagtttagggagtag

SEQ ID NO: 5123 - DNA, 208 bp, Lilium asiatic
  Clone ID: LIB3230-035-P1-K1-H2
accagatctacatcctctccaaccttgaatttgcagaaccaatcatgctactgagtctcgtgtttcttcttaaggcctcacagctgaacagggactagggtgtgttaagcaaacggtgtaacgtacggatcatgtttatatgttatctctcaacttgctcccgatttttgtcctgccaatggttttcgtttttgctggccccagagtt

SEQ ID NO: 5124 - DNA, 406 bp, Lilium asiatic
  Clone ID: LIB3230-035-P1-K1-H3
ctccctaaaaggagcgggaactccaaaaaaacacaataagagagcgagcaatttccctaatgtgatgtttgtacttgacatgaacaagacagttgaaacaaagtaccttgagaagagataataccttatatgtgggagaagagttattcacaagctttattagatcaaaagactttgatcctagtatgaaattgtgtctagataatcataatgaacttcttataaacacaaaaaaatctaagatctttaatagagaaaatacaccccatatattgagaataatcatttacaaagataacattgtagaaacaaccagatcaagaacttggagaaagtccccaaatattagaatgaaataaatcaaatgtaagcatgagttttggattggcttgtagaaaaagacaat

SEQ ID NO: 5125 - DNA, 395 bp, Lilium asiatic
  Clone ID: LIB3230-035-P1-K1-H4
cggacgcgtgggaaagggaatactatttcaaggtctcgattttttactgactggattgtcaagtaaaaaggaaaaggaacgcgaggaattaatcagaaagcatggaggttatgttctatcaagtataccacctcttcttccggatgtaatgcgaaaaaggatagatactgcatgcttgaaacttcctattgtgttgtccccgaagaaggtgcaaacaactaaattcttatatgggtgtgcaaccaacaggtggatcttaaatgataattggcttgttgactcagttcaggctggttctgtattgccacctggaaagtatacaatgcggccgatgctagcttccgggatgaaatgcctgagaattacagatccaccttgctttaacgacaccttta

SEQ ID NO: 5126 - DNA, 404 bp, Lilium asiatic
  Clone ID: LIB3230-035-P1-K1-H5
gaaggctgcagccttatctgcgggaccttgagaaggatgtttttggtggtgaggaaattcttgacactcatgctcttgaagttgtaaagaaaactgaggaattgcctattatgttaagtgtggatccttgtctggcactcaaggatgatggtgtgaaactggttggttcaccaacacttacagaggacagcaaaaaatcagattctggaaattctgcacctagtctccttgatgctgctcttgatgatatgattgctgcagaatcacctgacccatttggccagaattcatttcaagctcccatggtttctgatattgaaatgctgcaactctgtaattcatcctcttattctccatccaattctgtaaccttgtctattaaagagttagcgggcaatacatta

SEQ ID NO: 5127 - DNA, 395 bp, Lilium asiatic
  Clone ID: LIB3230-035-P1-K1-H7
cggacgcgtgggcgaactccaaggatgaccctgccaaggaggcggccaacttcacttcccaggttatcatcatgaaccaccctggccagatcggtaatggttatgctcctgtcctggattgccacacctcccacattgctgtcaagtttgctgagatcctgaccaagatcgacagacgctctggtaaggaaattgagaaggagcccaagtttttgaagaatggtgatgctggattcgtgaagatgattccgaccaagcctatggtggtggagactttctccgagtatcctccgcttgggcgttttgctgttagggacatgcgccagactgttgctgttggggttattaagagtgttgagaagaaggatcccactggtgccaaggtgaccaaggct

SEQ ID NO: 5128 - DNA, 393 bp, Lilium asiatic
  Clone ID: LIB3230-035-P1-K1-H9
cagaaaagaaggaaaaaccagaatcgatgaatgcatttgcgctaatttcgagatcacaaggttttgatcttgggaatttgtttgaaaaacagatgggtctcatcaagcgggagactcggtttacttctcagcgccctcctaacgagataatgtctaaaatagaggaaactgcgaagcctttgggtttcaatgtgcgcaaacacaactataagatgaagttacagggcaacaagactggacggaagggacatttatctgttgcgacagaggttttcgaagtagctccctctctccacatggtcgagcttcgtaaaatgggaggcgataccttggagtttcacaagttctacaagagtttctcgtcaggcctgaaagatatagtctggaaatcag

SEQ ID NO: 5129 - DNA, 176 bp, Lilium asiatic
  Clone ID: LIB3230-036-P1-K1-A1
tctgttggtcagctcaaggagtttgaggggaagaaactggtctcggcaaccaacgaggggttgaagcttgaagagagtgttgatgagacgaaacataaggcagcacaaaaggagaaatttgtggggctctgcaaggtgattaacgaggtgctcgcatacaaagtggagaagagtgg

SEQ ID NO: 5130 - DNA, 193 bp, Lilium asiatic
  Clone ID: LIB3230-036-P1-K1-A10
aggggaggctctagtcgagactagtgcaggtaaaactgtgatctttaccagtgatgaatcgatggctatggtgatctttgaagctattgccagtgtttgttatggaatctaagcagtcagatttatgaaggtgcgggctttgtttagcaagattgtgttcgctggatggctgataagcaattgatagtagtat

SEQ ID NO: 5131 - DNA, 418 bp, Lilium asiatic
  Clone ID: LIB3230-036-P1-K1-A11
aggggaggctctagttgagactagtgcaagtaaaactgtaatctgcaccagtgatgaatcgatggctatggtgatctttgaagctattgccagtgtttgtgatggaatctaagcagtcagatttatgaaggtgcgggctttgtttagcaagttgctgttcgatggagggcggagaagcaattgatagtagatggtgacgaagatgaaaagtatgaatatgtccgaggaggagctgctctggcaagaaatgagatctttgggaagtagagtactatactgtgactggatctgttatttgagatcttgagattatagaattcgacatgctgttggtacaaaaacatagtttctgttggtgcaaaacctaactatgttgaacttattgtttaccagatgaaaggagttcattgaggcaact

SEQ ID NO: 5132 - DNA, 415 bp, Lilium asiatic
  Clone ID: LIB3230-036-P1-K1-A12
cctctctcgattcagtgccgccgccgccgctgccgctcttcctccgtcgaccggaaaagccgctgaaatggcagctgaagatgttgttgccgaaacccctgcccctgctcttggggagcccatggacctcatgaccgcccttcaagttgtcatgaagaaatcactggcccatgatggtctcattcgtgggctccatgagggtgccaaggcaatcgagcagcatgctgcgcagctctgcatcctggctgagagctgtgaccaacttgactatgtcaagctggtgaaagcactctgtgctgaccacaacgttcacttggtcactgtgcctagcgccaaaagccttggcgaatgggctgggctctgcaaatttgactctgagggtaaggcgaggaaggttgttggatgctcatgtgtg

SEQ ID NO: 5133 - DNA, 391 bp, Lilium asiatic
  unsure (1)..(391): unsure at all n locations
  Clone ID: LIB3230-036-P1-K1-A2
cccacgcgttcggtcggggcaaggtaagggtggaaaaagtctaggcaagggaggagcaaagccatcggatggtgcttcgtgacaggcatcaccaagctggggtggtgtgaagaggatcagtgggttgatctacgaggagactcgtggtgtattcaagattttttttggagaatgtgatccgtgatgctgtgatttatgctgagcaagcttgccacaagacggtggcggcgatggatgtggtttaggtctcaagcgccagggccgtactttgtatgggcttggtggctgtggttggatatctgtttacaaagtcttgctgtcaagaagttggattgtgagtttgttttcagtttggaggtttggattgcaggaaacaaatatcttgntttgt

SEQ ID NO: 5134 - DNA, 419 bp, Lilium asiatic
  Clone ID: LIB3230-036-P1-K1-A6
tcatcactataatcgtgcgcccatgcactcttatggcattaattcgagagtaactggggatcaatccgaaattaaataacatagccttcatgaactagagaagaaaccttgagtctcaccatttatccaaacagattctgaaaatgattctgaaaattagatttttcatttttagaatagttttcaatactctattaggaaatgttccaactcaacaattatcttccctaatctacaaggcgttaatggctctaccattctcagaaggctatcaacgctatgattttaaagactttatcaaagtgctattctattttttaaacactaattaccaggtactcttgtatttgaagacatgcaaactgacgatgcagaccggctgctacctaacttgtactaacaggacgacacttatttcc

SEQ ID NO: 5135 - DNA, 410 bp, Lilium asiatic
  Clone ID: LIB3230-036-P1-K1-A7
tctgttggtcagctcaaggagtttgaggggaagaaactggtctcggcaaccaaggaggggttgaagcttgaagagagtgaggatgagaagaaacagaaggaagcacaaaaggagaaatttgaggggctctgcaaggtgattaaggaggtgctcggagacaaggtggagaaggtggtggtgtcagaccgtgtggtcgagtcaccctgctgcctggtgacaggagagtatggctggactgcaaacatggaaaggatcatgaaggcttaagcgctcagagactctagcatggctggctacatgtccagcaagaagaccatggagataaacccagataactcaatcatggaggagctgaagaagcgagcggatgttgacaagaatgataagtctgtgaaggaccttgtgctttt

SEQ ID NO: 5136 - DNA, 419 bp, Lilium asiatic
  unsure (1)..(419): unsure at all n locations
  Clone ID: LIB3230-036-P1-K1-B1
tcgacgaccgcngcaacctggtcgtctacagccctaaggccgtacccctttggcagagtggcaacggaaccacaggaggggaatatgtcatcctccttcagaagaacggagatgccgtcatcttcggcactgctaaatggtgggtggtatggcctactttgaacctagtcgcctctaacaccacagcgcccccattagaaggtaatgaagaagcaaccctattatcagctatgcctgaacctgctaatgtaccggacacctgggaaagcccagaaactagtgaatccctcccttgggaacataatgttttgtacacttgggaaaccctaaaaaccggtgaatccctcacttgggagacatacagatgcacgatgcaaaccgactgcaactttgcttgttggaaatggacccaacttatt

SEQ ID NO: 5137 - DNA, 402 bp, Lilium asiatic
  Clone ID: LIB3230-036-P1-K1-B10
cggacgcgtgggggcggcgcagtccggcgaactcgccgccccgtactaaccaactccgcctcctccagccagagcgcttcgggcggggcagtgcgagagacgatggacgactacgctagggagatgatggacctcaaaaccctagtcacccgcaccctcgagaagaagggcgtcctcgccaaaattagggctgagctgcgggctagtgtgtttgaggcgattgaggaggaggaccgggttgtcgagaatgaagagagtgtggcgcctgcgttgcttggtagctgcaacgatcgcgctaagcaactgcatgcgtctccttcaggaaggctactaacagcactgatatgtgaatacttggactgtgctcagttaggccacacacttaaaggttacatgcctgag

SEQ ID NO: 5138 - DNA, 415 bp, Lilium asiatic
  Clone ID: LIB3230-036-P1-K1-B11
aggggccgacgcattcgagactactgcaagtcaaactgttatctgtacctctgatgaatcgacggctatggtgatctttgaagctattgccagcgttttcgatggaatctaaacagtcagatttatgaaggtgcggtctttgattaacatgttgctcgttcgatggacgtcggataaacaattgattgtagatggttactaatatgaaaagtatgaatatctacgaggaggatctgttctgtcaagaaaatcgatctttgtgtagtaatatacttatcacgaactgtattctttatttttgaagttctctttataagcttacattatttcttatagttcaaaaacatagttgtttaatgttgatatgaccatatcttttgtccactactagttactatagaatactggtttatca

SEQ ID NO: 5139 - DNA, 247 bp, Lilium asiatic
  Clone ID: LIB3230-036-P1-K1-B12
tccactcgtacaagctggactgcattcaaactctgagattctcacatgctgggggggtcaagctgccttttactctcctaggaaaacaaaacggatctgctgtggagactatagttgaatttcatatatactccacttcagcttaactgcttactagagggctatgaacaaactgtaaaaccttcattggatgccaaaacgtgccaaggttgcctccctgaagggactatcatcatttttccacctt

SEQ ID NO: 5140 - DNA, 310 bp, Lilium asiatic
  Clone ID: LIB3230-036-P1-K1-B2
accacgggtgggacctgagcgcttacaccctttatttatttccctgcagtcaaggggggagccgtaccaactgaggggggcaagaaaattaccctcccaagtacgtggctaccttgaaataccgaactgataaatggagagtggtatgaccttctttccacctagccaaatatagtaccccccctcctcaatttcaagcttaatgatgatcccccctctaatgatctgtttgttatactgctaatgtaccatacactcaagcctgccgttaaactagtgaatcccttcgtgaagaacatattgcttctta

SEQ ID NO: 5141 - DNA, 416 bp, Lilium asiatic
  Clone ID: LIB3230-036-P1-K1-B3
ctgtcattggccataattcacatgaacactctgttgtcttacaaagaggaggaaggaccactggtttacccgaagccagacatcacattgaacaaggaaccctatatgctgtaagagtaaaggatcgtcaacaagggcgttccaaatatggggtcaaaaagcccaaataagagatgtggttttagcccttataaaaagaaaacaggatcttcagacctctttcacgctcatgtcacctagcggtacatgcagatgaaaaaactggacaatctgatccaaaacatcgtaatcgatgagctaacatgtaggataacccaattctgcaacacgctaaaccattactgcatgatgaaattatttatcgagccttggaaacaaacctacatacgacaggtacaacatcactatctggttta

SEQ ID NO: 5142 - DNA, 402 bp, Lilium asiatic
  Clone ID: LIB3230-036-P1-K1-B5
agacaggattgaaagagagagcctgcaaaacggaattatctgaaaaagaattgcagattaaaacaagaaaagaaattgccgcccttggcgtacagcttggtaagatgaaaatcgtttcctgggctagtcaagctgagacagatcctggtacgccttctctcaaggctcgagagatggaccaacttgtgaaggcagaatatgttgcccgtgcagcagcgtgggaggatgctgagaaatcgaaacatatagccagatataaacgtgaagagttgaagattgaagcatgggagagccatcagagagcgaaattcgaagcataaatgagggaaattgaggctcaagtggaaaggacgatagctctcgcccaggacaggatgctgtagaagactgcattagcaagcc

SEQ ID NO: 5143 - DNA, 328 bp, Lilium asiatic
  unsure (1)..(328): unsure at all n locations
  Clone ID: LIB3230-036-P1-K1-B7
aatnnnaaggtcgacctaggctttcttctactattgataccttatcttctacagccctaatgccttaccctcttaatagggggggtgctaaaccacatgtggggaatacgtcattcatcctcattataacgtatatgccgtcattatttatactgctaaattgtggttggtatggcctacctttaatctattcaactttaacactccagttcctccattggatagtaatgaataatcatccctattatcagctattcctgaacctgttaatgttcctaactcctgttaaagccctgatactatgtgtaatccttctttagggaacata

SEQ ID NO: 5144 - DNA, 153 bp, Lilium asiatic
  Clone ID: LIB3230-036-P1-K1-B8
ctgttggataatcattttagtgaccatgttatgatttgatgggtattcttgaaaactcgttttatcttctcatgtcttagtacttaaacctgcaattttattcctatatttttacatgttatgcttgttgtgtaaggtcttttaattctgaaa

SEQ ID NO: 5145 - DNA, 96 bp, Lilium asiatic
  Clone ID: LIB3230-036-P1-K1-B9
acgcctacgcttgtaacccttgacgggaacttctttttttatctccaagctgacaaggggggagcgtcactgcccgagggcgacatgaaagtgacc

SEQ ID NO: 5146 - DNA, 369 bp, Lilium asiatic
  Clone ID: LIB3230-036-P1-K1-C1
cccacacttgatatccgtcaggtgatctttctgtagcatgtccacgctgacaagggcgtatctaccctacctgagggatacaagaaagtgacctagccacccatgaggcactcttgatatacgaacctgacaatgggcgactcccaatgaccatcgaacaatgccgccaattcgaacactccccatccttcatttcaggcaaacggattctaccgcctactttgcgctcatggcagcattcgttacaggtccatgtaaaaaaggcagacgttgatcaaaagcatctttaccaggggaccatcttgcaccttaacccattatggcgcttacatatcgcagcaccgcatgatgatattcttcatcttgccc

SEQ ID NO: 5147 - DNA, 419 bp, Lilium asiatic
  Clone ID: LIB3230-036-P1-K1-C10
ctactatccgccgccggagactacagcgaagtacgagatgccggccggtcatgggcagcgctcgcgcacgcgcgacctcttcgcccgtcccttcaggaagaaggggtacatcccgttgacgacgtacctccgcacctaccacatcggtgagtatgtggatgtgaaggccaacggcgccatccacaaggggatgcctcacaagttctaccacggccgtaccggtcgcgtctggaacgtcaccaaacgcgccatcggcgtggagatcaataagcaggtggggaacaggattatcaagaagaggatccatgtgcgtgtggagcatgtgatgccctcgaggtgcactgaggagttcaggctgaggaagataaagaacgaccagttgaaggctgaggcaaaggctcgtggtgaggtgatcagca

SEQ ID NO: 5148 - DNA, 409 bp, Lilium asiatic
  Clone ID: LIB3230-036-P1-K1-C12
cggacgcgtgggtcccaagcgaaactgctaagcagctgagatcgacgactccaatggatctgtcgccccacacctcctccggcaacggcggcttcgccgccgcccccgcctctctcacgcccgcccaaactccgatctccaaccccgccaccgccgatccagtggacgatcagaagcagaacctcaaccacgtcatcaactccatccagaaaaccctaggcctcctccaccagctgaacctcaccgtctcctccttcaacgtcgccgcgcagatgccgctcctccagcgcctgaacacgcttgtcggggaattggatacgatgcagaaattggcggataattgtaatattcaggtcccggtggaggttctcaatctgattgatgatgggaagaacccggatgagttcac

SEQ ID NO: 5149 - DNA, 421 bp, Lilium asiatic
  unsure (1)..(421): unsure at all n locations
  Clone ID: LIB3230-036-P1-K1-C2
gccacagatgagaccccagagctcatgcctctgactcatgtccttgcaaccaagctcggtgctcgcctaactgaggtacgcaagaatgggacctgcccttggctgaggcccgatggaaagacccaggtgacaattgagtatcagaatgaccatggtgccatggtgccaattcgtgtccacaccatcctcatctccacccagcatgatgaaaccgtcaccaatgatgagattgctgcagacctcaaggagcatgtgatcaagcctgttgtccctgagaagtatcttgacgagaagaccatcttccacctcaacccgtcaggccgctttgtgattggagggccccatggtgatgctgggctcactggccgcaagattattattgacacctatggtggctgtngagctcatggtggcggtgcct

SEQ ID NO: 5150 - DNA, 221 bp, Lilium asiatic
  Clone ID: LIB3230-036-P1-K1-C3
cttctatatccaccgatacagcccacagagagaccgtcatctttgtaccactagcctgtgacagcaaaatattggtcctctgtctcaattctgtcacatcttgtatgatttttgtgggaggacactctttggaaatcccacataaatcaccatcaaatggggacgagttcactcatataccaaggatgttatcccgccaattaagatccttttgtgcaaaa

SEQ ID NO: 5151 - DNA, 417 bp, Lilium asiatic
  Clone ID: LIB3230-036-P1-K1-C4
gccatttgtacaagctggtctgcaggcaaactctgagattatcagatgcttggcttgtaaagctgtatcttatctcctaggaaatcaaaatggagctgctgtggagatgattgttgaatatcatatatatccacttctgattaactgcttacttgagggcaatgaacaaacttcagcagcttcactggatgccataaagagtcttggttgctttcctgaagggattagtatcatttttccaactagcagtggagaatctatacaactgaaaactgtagcatcaagctgctcttcgctggcaaggattcgaattttggggctcattgcccaattgttctccatatccagctctgttgcatcaactgttcacaactcgggcctgctaaatttatttgaggtggaagttaataacaaaaa

SEQ ID NO: 5152 - DNA, 393 bp, Lilium asiatic
  Clone ID: LIB3230-036-P1-K1-C5
gccactcgtgcaagctggtctgcaggcaaactctgagattatcacatgctagggttgccaagctgtctcttatgtgctaggaaatcaaaacggatctgctgtggagacgatagttgaataacatatatatccacttctgcttaactgcttactagacggcaatgtacaaactttaacacctcttctggatgccataaatagtctcggttgctttcctaaagggattagtatcaccgttccaactagcaaaggagatcgtatacaacttggaactggtgcatcacgctgctcttcgctatcaaggatctcagttttggtgctcactcgccaattgacctccatatctagcagtgctgtatcaaccgctcacaactctttcctgcttttattttt

SEQ ID NO: 5153 - DNA, 370 bp, Lilium asiatic
  Clone ID: LIB3230-036-P1-K1-C6
gaccacacgcgtccgccgacgcttgggacccaacagctgaggcctctgactagggtccacgctaacaagggcggagctgcactaactgaggtacgcaagaatgggacctgccctagactgacgccccatggatatgacagagctgacaattgaatatcagaatgaccatggagccatgtagccaattcgagcacacaccatgctcatgttcacccaatatgatgaaaccgtcaacaatgatgagattgctgcagacctcaaggaccatatgatcaagcctggcgtccctgaaaagtatcttgacgagaagaccatcttgcacctcaacccgtcaggacgctttgtgattggagggccctatggtgatgct

SEQ ID NO: 5154 - DNA, 422 bp, Lilium asiatic
  Clone ID: LIB3230-036-P1-K1-C7
tcggccacagatgagaccccagagctgatgtttttgactcatgtccttgcaaccaaggtcggtgcttggcttaactggggacccaagaatgggaccctcccttggctgaggccccatggaaagacccaagtgacaattgagtattagaatgaccatggtgccatggtgccaattcgtgttcacaccattcttattttcacccagcatgatgaaaccgccaccaatgatgagattgctgcagacctcaaggagcatgtgatcaagcctgttgtccctgagaagtatcttgacgagaagaccatctttcacctcaacccgtcaggccgctttgtgattggagggccccacggtgatgctgggctcactggccgcaagattattattgacacctatggtgggctgggagctcatggtgggggtgc

SEQ ID NO: 5155 - DNA, 254 bp, Lilium asiatic
  Clone ID: LIB3230-036-P1-K1-C8
aattacatacaatgacaataaaatgaaggccagcttttatatttcccgataaatcccacaaagagaccgccatctttgcaccactagcctgagacaacaaaatattgttcctctgtctcaattctgtaacatcttgtatgattttggtgagaggacactttttggaaatcccacataaatcaccatcaaatggggacgagttcactcatataccaaggatgttatcccgccaattaagatccttttgtgcaaaa

SEQ ID NO: 5156 - DNA, 376 bp, Lilium asiatic
  Clone ID: LIB3230-036-P1-K1-C9
tgcatgttgaaaagggtatgcagaatggccagaagataaccttccctggagaggctgatgaagcgcctgattgcgtcactggcgatattgtgtttgtcctccaacaaaaagatcaccctaagttcaagagaaagggtgatgatttgtttgttgaacacacactctcccttactgaagccctctgtggttttaggtttgtgttgacccatttagataatcggcagctgctaattaaatccgagcccggtgaagttgtcaagcctgatcaattcaaggcacataaatgatgagggtatgccaatgtatcagaggcccttcatgatgaggaagctttacatacacttcacagatgacttccctgactcactgacgcctg

SEQ ID NO: 5157 - DNA, 415 bp, Lilium asiatic
  Clone ID: LIB3230-036-P1-K1-D10
agtacatcagatttgctgcctgtcgagatggtttctcttcagaacggggagctcgtttggttcactgacaagccagcggtgtcaatgttgtcgagcatctgaagcccacgattgtataaatttgaagcttcaatttgatgggattcatacatgattgggtcttgttcggttgcacggtgattggaggggattagggatgattaaatctctttctattcaattttaaatggtaagagacttaatctcctctaattctcctcaatctgattttaaccgaacaagtccttgaggaaatctattcggttcgacatagaactctgagtgaatagattcggcatagaactctgaggtgtcgttgtcgaggaagtttgtcttggattccattttctacccactaataattatttagacccgt

SEQ ID NO: 5158 - DNA, 365 bp, Lilium asiatic
  Clone ID: LIB3230-036-P1-K1-D12
tattttagcttctcgcatgatttattttataggatatatctattttgggaggttgcagtaaccacagtttatcagcatattaacgcaaccaatctaattatactgaaaacaaatataataccatcaccattgttcccaaattgagcaacagacttgcgaatcagactagttgtattctccagcttattatacacttgatataattgctaatcacaatttgttgcaaatttcaaattccagtagttcccaaatttattcagagtgtcctctagaataatttcaaatacggagcacagtatgatgcaaaggttacattgtaatctgtatcttattttttgttttacagatatacttgctttgatgtt

SEQ ID NO: 5159 - DNA, 312 bp, Lilium asiatic
  unsure (1)..(312): unsure at all n locations
  Clone ID: LIB3230-036-P1-K1-D3
ggagaagatttttctgttgaaccttctgagagcaggaggcctttccgtgctctccttgatgttggtcttgtcaggacaactacaggaaatcgagtctttggtgctcttaagggagccttggatggtggtcttgatattcctcacagtgataagaggtttgctggtttcaagaaagatgacaagcaactggatgcagagattcataggaaggacatctttggaggacatgttggcttttacatgaggtctctgattgatgaggagccagagaagtaccagactcacttttctgaggtcatcaagcggnggatt

SEQ ID NO: 5160 - DNA, 424 bp, Lilium asiatic
  Clone ID: LIB3230-036-P1-K1-D6
aatggcggaaaccgctgtcgacgaagccgctcgccgccgtgctgccgccgtcagcgactaccggaaaaagaatctccatcacaaggagctcaactcccgcctccgcacagggagagaaaatttgagagctgcgaaaaaggagttcactaaaactgaagacgacttaaagtccctccagagcgtggggcagattatcggagaagttctccgaccgcttgataatgaacgcttgattgttaaagctagcagtggcccaagatatgtcgtcggctgcaggagtaaggtggacaaagagaagctaacagctggaactcgtgtggttctcgacatgactacactcactatcatgcgagctctcccccgtgaggtagatcctgttgtatataacatgcttcacgaagaccccggaaatgttagctactct

SEQ ID NO: 5161 - DNA, 224 bp, Lilium asiatic
  Clone ID: LIB3230-036-P1-K1-D7
cgcacgcttaaaagggtatccagaatggccagaatataacctttcctggtgagggttacaaacttcctgactccttcactgacgatattgactttgttctctaacacatatatctctcctaagcttaatttaatatttcatcatttttatttctgaatacactcttttccatacttgaaaccctctgtggatttagttttgtttttacccatttacataatcga

SEQ ID NO: 5162 - DNA, 411 bp, Lilium asiatic
  Clone ID: LIB3230-036-P1-K1-D8
ggagaagatttttctgttgaaccttctgagagcaggaggcctttccgtgctctccttgatgttggtcttgtcaggacaactacaggaaatcgagtctttggtgctcttaagggagccttggatggtggtcttgatattcctcacagtgataagaggtttgctggtttcaagaaagatgacaagcaactggatgcagagattcataggaagtacatctttggaggacatgttgcctcttacatgaggtctctgattgatgaggagccagagaagtaccagactcacttttctgagttcatcaagcgggggattgatccagatcatattgaagagatgtacaagaaggtgcatgctgctatccgcgaggatccaacaatagtcaagtccaccaagccaccaccaaaggagcac

SEQ ID NO: 5163 - DNA, 362 bp, Lilium asiatic
  Clone ID: LIB3230-036-P1-K1-E10
tattttagcttctcgcatgatttattttataggatatatctattttgggagggtgcagtaaccacagtttatcagcatattaacgcaaccaatctaattatactgaaaacaaatataataccatcaccattgttcccaaattgagcaacagacttgcgaatcagactagttgtattctacagcttattatacacttgatataattgctaatcacaatttgttgcaaatttcaaattccagtagttcccaaatttattcagagtgtcctctataataatttcaaatactgagcacagtttgattcaaaggttacattggtatcctgtatcttatactctttttttacaagtatacttgttttt

SEQ ID NO: 5164 - DNA, 267 bp, Lilium asiatic
  Clone ID: LIB3230-036-P1-K1-E11
gtcgatttcatcttctcttacccctattgacgggaacgaccgccgcgatccggactgtttccggtcaccttccccgatccggccaggtgacggcagccgagtgagctgtagttgttgctgggattgctagctcatcttctggagctagtttgattcactcatattctggacctcttattaagtggatcgaccaaaatttataaaacttcttttggcttggggatgacctcaccgatgattgggaagaagcaagaagagaaggggaga

SEQ ID NO: 5165 - DNA, 416 bp, Lilium asiatic
  Clone ID: LIB3230-036-P1-K1-E12
cttttggatgcactcgacttcaaccaggttgtaatttttgtcaaaagtgttggtcgagcagcagagctgaacaaattgcttgttgaatgcaattttccatctatctgcatccattctggaatgtcacaggaagaaaggttgactaggtacaagggctttaaagaagggcataagaggattctcgtggccactgatttagttggcagggggattgatattgagcgagttaatatcgtcataaattatgacatgccggattctgcagatacttatttgcatcgggttggcagagctggtcgttttggcaccaagggtctggccattacatttgtctcatctgcctctgactctgatgttcttaatcaggttcaatccaggtttgaggtggacattaaggagctgccagagcaaattga

SEQ ID NO: 5166 - DNA, 127 bp, Lilium asiatic
  Clone ID: LIB3230-036-P1-K1-E2
cccatattccataacagacttaagatctattttttgttaatacactcacatagaggccgttacaccccctctcaaagcaaacaaaaaaaccccaaactacccataaaccaaggcctatcattcaaac

SEQ ID NO: 5167 - DNA, 391 bp, Lilium asiatic
  Clone ID: LIB3230-036-P1-K1-E3
gcgactggttgtgtaaggcatgtcatatgttgaactgcttgacctaggcgataaagttgggtttgtcagtgctggttcaagagaagaagagattctgggctgccttcgcaaatcgaagaacccggttttcactggcccttcattttgcttctccgaaaggggaagaaaatgctgcatttgccaggaagagtatgaagtgaatgatgagatgggaaggctttattgtggccatagctaccatacatactgcatcaagcagtggctcctgcagaaaaatgcttgtcctgtctgcacgtcggtggcgagcaaaggtcatattagatatcgaggcgcatgcattctcttttatatgtacagtaactgctctgatctgcatacatcaataattttg

SEQ ID NO: 5168 - DNA, 418 bp, Lilium asiatic
  Clone ID: LIB3230-036-P1-K1-E4
ggtttagggagaagcggaaggagcggaactttgataagaagatccggtatagcggtcggaaagaggttgctttgaggatgcaacggaacaagggtcagtttacatcatccaaatcaaagcctgaagaaacgactccgggtgaaaccagttgggatgccacccaacagtggggttcagtggatggtcgtcctccagcagcaccagaatgtcatcactgcggcatcaatgctaaatctactccaatgatgcgtcgaggtcccaatgggccaaggaccttatgcaatgcctgtggacttatgtgggctaataagggtacactgagggacctttcgaggactccggccatgattcccattcaaaatgtgttgcctccacaccaaagtacctttccagaatcacagaaggttggggattcaac

SEQ ID NO: 5169 - DNA, 337 bp, Lilium asiatic
  Clone ID: LIB3230-036-P1-K1-E5
ggtttagggagaagcggaaggagcggaactttgataagaagatccggtatagcgtgcggaaagaggttgctttgaggatgcaacggaacaagggtcagtttacatcatccaaatcaaagcctgaagaaacgactccgggtgaaaccagttgggatgccacccaacagtggggttcagtggatggtcctcctcctgcagcaccagaatgtcatcactgcagcatcaatgctaaatctacttcaatgatgcgttcaggtcccaatgggccaaggaccttatgcaatgcctgtggacttatgtgggcttataacgtctcactgatggaccttttcaggac

SEQ ID NO: 5170 - DNA, 419 bp, Lilium asiatic
  Clone ID: LIB3230-036-P1-K1-E6
cggtgctctccaagaagtccggtctcctctttgagcgccggctgatcgagcgccacattgcagattatgggaagtgtccggtcaccaaggaggagctctcgatggatgacatcttaccggtgaagacgaatatggagtcagatgctttaatgctgtcaaattttgcgttggagcaacagttgcatactgccaggcaagagcttagccatgccttatatcaggatctcaacattggtttagcattatggctggctgctggtggagatggctggatcgatgaagagatttcccaatttcccccacaatatggtggtcattatcgatacaagtccacagcgagaattctgttggttggttctggtgctgatgagcaatgtgctggttatggcagacataggactaaatacagactgggaagt

SEQ ID NO: 5171 - DNA, 403 bp, Lilium asiatic
  Clone ID: LIB3230-036-P1-K1-E8
ttttctgcaacacactcatccatctctttcgcattatgactccaacgagtgggactggctccggggggcacttgcgacggtggaccgcgactatggttttctcaacaaggtgttccatcatataaccgacacccatgtcgcgcaccacctcttctcaacgatgccgcattacaatgcagaggaggcgacacgggctattcggccgttgcttgggaagtactaccagttcgacagcacgccggtggtgaagtcgatgtggagggaggcgagggagtgtgtcttcgtcgagcctgatgttggtgacggcaagccgaagggcgtgttctggtatagcaataaaatctgaaagtgagggaccggtcgaatgcaagtatcgtggtatggtccctagtagtactgcttt

SEQ ID NO: 5172 - DNA, 119 bp, Lilium asiatic
  Clone ID: LIB3230-036-P1-K1-E9
ttttcctctccaatctatcatttttttttttttttctggctatagaccgcatggggggttacattactgtcttaaccatcaaattctgtttccctctgtaccttcatttcatattaaat

SEQ ID NO: 5173 - DNA, 367 bp, Lilium asiatic
  Clone ID: LIB3230-036-P1-K1-F1
ccaacttgatgtgtaaggcatgtcattttttgaactgcttcgcctaggccatattgttggttttgtccgtactggaaaaagataagcagacatactgtgctgccttctcaaatcaaataacccggcttacactggcccttaattatgattctactaaatggaaagaaaatgccacatttgccaataatagtattaagtgaatgatgagatgataaggctttattgaggccatagctaccatacatactgcatcaagcaatgccttcttaataaaaatgcttgtcctgactggacgtcagtgacattcaaaagtcatattagctatcgatgcacattcattcgtactaatttgtacagtatctgctct

SEQ ID NO: 5174 - DNA, 415 bp, Lilium asiatic
  Clone ID: LIB3230-036-P1-K1-F10
caacgctcgccatggtatcatcctctccggcggctccggcgatagacggaatcctggatgacatcactgtctcaacgttcaagtgctgcatctgcctggatctcctgtacaaaccaattgttctcgcatgtggccatatatcttgcttttggtgtgtgcacaaatctatgcatagttcacgaacatcccactgtgccatgtgtaggcatccgtataatcatttccccagtatttgtcaattgctccaccatttgctccaaagaattgctcctgcaacctacaagagaagggaaaaggaagtgctagaggaagaaaggaatatggagaccttctcacctcagtttctggatggtcagaactctaaaaggattcattctgatatcaaaatatctggcgagaatttaaaaaagaaaag

SEQ ID NO: 5175 - DNA, 362 bp, Lilium asiatic
  Clone ID: LIB3230-036-P1-K1-F11
tttgtctccccactgcaggaatttcatgaaggacggcggagatttaacgcgtgcgggcaaaagctattaagcaaggaaggaaacgatcatgcacggagggccgagatctgaaaaagatgctggatggctgtgatgaggtgaaggtacgatgtgcagttctgatctgacggcgaagaggaaggccgtgcatggagcttctagaggcgcatgtggaaggagctctccattggacgcgcatgtgaagtgctcgaagcataagacggagccgggccgaaagcgaagtctataaaagcaccgtaccgatcgacgatttatctgaagtcttagaccaagaagatctatcattctctgagccatattta

SEQ ID NO: 5176 - DNA, 81 bp, Lilium asiatic
  Clone ID: LIB3230-036-P1-K1-F2
ccaaaattccctataagccatgacaacttttgaacttcttccccgagacagaggggggggttgagtccttctttgaacgac

SEQ ID NO: 5177 - DNA, 379 bp, Lilium asiatic
  Clone ID: LIB3230-036-P1-K1-F3
ggccggacccactcgtccgctggttaaaaaagttggaagaagaaaccatttccctgaaagtcaaaatggaggaggtggtcgactctctcaaaggagtcgagaacgaagcacaggctgcgagagattctgaaactgatttgatgaccaagctgaaggaggctgaaactgagatgaagactaaattgagacaagccgagtctggcgtggccgatgcaaatgcagtggcagaagctgcaaaggctgagactctgaagttgaaggaaagactactggacaaggaaaatgagctgcagagtatcagtcaagagaacgatgacctccatgctggagaagcctccaatttagagaaaatcagagaattatctattgtgcttgctga

SEQ ID NO: 5178 - DNA, 245 bp, Lilium asiatic
  Clone ID: LIB3230-036-P1-K1-F4
cggagctctccaataagtccggacagctctttgttctctgtccgatcgaacgcaagggggcagattatggcaagtgtccgctcaccaatgaccttctttcgattgatgacatgttaccgttgaacaccaatatggcgtcagatgctttaatgctgtcaaattttgcgttgtagcaatatttgcattctgccactcaagagcttagccatgccttttatcattatcccaactattgtatttcatca

SEQ ID NO: 5179 - DNA, 188 bp, Lilium asiatic
  Clone ID: LIB3230-036-P1-K1-F5
cggacccttcaaataaatcaggagatccctcagatttcgatccaatctaacagaagctggtttttaattattgggggccacacaacagagacctactctcgaatgacgacatcttaacgtacaaaactaatattgtgtcagatgctacaacactgtaaatatttgccatagagcatcatcttcatact

SEQ ID NO: 5180 - DNA, 158 bp, Lilium asiatic
  Clone ID: LIB3230-036-P1-K1-F9
cgacctacgcgtccgcggacacattataaaaaacataaaactccacaaaacactatacacgaaccaaaagtaccaactacaacttcttacacacccaaaacaataacccaacaactaaaaacacaacattaatccacataccaaaaaatcacaactcc

SEQ ID NO: 5181 - DNA, 421 bp, Lilium asiatic
  Clone ID: LIB3230-036-P1-K1-G1
ctcgataaaaaagttggaagaagaaaccacttccctgaaagtcaaaatggaagagcggggggactctctcaaaggagtcgagaacgaaacacaggctgcgagagattctgaaactgatttgatgaccaagctgaaggaggctgaaactgagatgaagactaaattgagacaagccgagtctggcgtggccgatgcaaatgcagtggcagaagctgcaaaggctgagactctgaagttgaaggaaagactactggacaaggaaaatgagctgcagagtatcagtcaagagaacgatgacctccatgctggagaagccttcaatttagagaaaatcagagaattatctatgttgcttgctgaggccaccgccaagcgaggtggtgaaaatggcgaccacagcgactatgagtatgatatgctg

SEQ ID NO: 5182 - DNA, 392 bp, Lilium asiatic
  Clone ID: LIB3230-036-P1-K1-G12
ggggagcacaaatccgttctgcgagtttaaaatagggaacggtcctccaaagcaaacaaaggttgtgagccatagcaactgcccagaatggaaggagggtttcacttgggagttcgatgttcccccgaagggacagaagctctacattctttgtaagagcaaaagtacattcggaaagagcacccttgggagagtaaccattcagatcgacaaaatcgtgacagacggagtgtacagtggattattcagtctcagtcatgacggtaagaaagacgtttcgtcaagaacactcgaaatcgagattgtgtggtcgaacaagatgtttggcgacggcatttaaaatggcgatcgacaatttgtaccaggcactcttaaatttgtgcaagacatgc

SEQ ID NO: 5183 - DNA, 262 bp, Lilium asiatic
  unsure (1)..(262): unsure at all n locations
  Clone ID: LIB3230-036-P1-K1-G2
tccgcccaataaaaaaanaagacaaagcaactacttaccttaaactcaaaacgcaagattgtttcttattaatttaatttagcccacaacaaaacacacgctgcgagacattctcaaactaaataaactaccaaacacaagaactcttaaactattataaaaactaaatttacactacccaactctctcttaaccataccaaatgcattatcataatctccaaaccctaatactctaaatctaaacaaaatactacatcaca

SEQ ID NO: 5184 - DNA, 197 bp, Lilium asiatic
  Clone ID: LIB3230-036-P1-K1-G3
gcgtccgccgaaaaagaatccgcgtgcctcaaagggtttacggttagatgctgatggccaaggtggcgattggaggacgttaatgccgaaaatgaccacgctaggggcttaaaagaaagcgagcgtgccgagcatgacaatgcaaaacctggtggcacgaagagaaatgtaagttcgaacaacgaaaccactttcaa

SEQ ID NO: 5185 - DNA, 410 bp, Lilium asiatic
  Clone ID: LIB3230-036-P1-K1-G4
gctatctggcgacagttttgaggagcaaccccaatatgattctgatgagagtgcaaagtggaggttgagaattctggcgagttggacttccacgacggtaactctgactatgaagtaggctaccaagaggaccgtgatgtcaatgttcaggaggatgaccaagacgaggaggattagtacaacaaggcgcctgccggcaaggaggtgtaggaggaagtgtccaggatctaattctgtcctgcccttgagtctttcaatgccctatccatgtattttgacccgatacactttcactgaccttgctttcatatcaagttgtcacaacccgaatctcggaaattcccgagcactgtggtcagtggaatcaacgtagcagtattaactatccatagcataaggctggaataata

SEQ ID NO: 5186 - DNA, 341 bp, Lilium asiatic
  Clone ID: LIB3230-036-P1-K1-G7
cggacgcgtggggatacatttatgtagtcactgggcaatttggcccccaatgtagagggcctacagctcgtaactttgtactggatactgagacgaaagagtggcaggacctgccaccattacctgtccctcggtatgccccagccactcaactatggagaggtagactccatgttatgggtggtagcaaggaggatcgatatgagcctgcattagaccactggagtcttgcagtaaagaatgggaaagcattggagaaagaatggaaaagtgaaataccaataccacgtggaggtccccacagggcttgtgttgttgttaatgatcaacttctggcaatt

SEQ ID NO: 5187 - DNA, 417 bp, Lilium asiatic
  Clone ID: LIB3230-036-P1-K1-G9
aaaaatattccaattgaggatgggaggaaacaatttgatgttgttgacaagggtgatgtcgtggttttacctgcatttggagccgctgtagatgagatggttgttctgagtgaaaagaaagtacaaattgttgatacgacatgtccatgggtttcaaaggtttggaacaccgttgagaagcacaagaagggtgaatatacttctatcatccatggtaaatattctcatgaagagactgttgctactgcttcatttgctggaaagtatatcattgtaaagaacatgtcagaggcaatgtatgtttgtgattacgttcttggaggtgagcttgatgggtctagctcaacaaaagaggaatttctcgagaaattcaagtatgccatctctcccggatttgatcctgatgctgatttagta

SEQ ID NO: 5188 - DNA, 421 bp, Lilium asiatic
  Clone ID: LIB3230-036-P1-K1-H1
cagaagaagaagcagcgagcctcaaaaggaataagggtagatgcggatggcgatgtgacattggaggacgttaatgccgaaaatgagcaagctagggctttaaaagaaagcgagcgtgccgagcatgacaatgcaaaacctgttgacaagaagagaaatgtaagttcgaacaaggaaaccacttcgaaattggatgaacgcagtccgaatggatatgatgagggacaaccgaggtcaaagagagcgaacagggcaaagagaagcatcaatgacaacattgaatctacagttgattcgacgatgaactaccagacgtcttcttcttattatggatagtaggggttgtgtgcgacaacaaaatatagctgattttttttgttgcggcatgcagacatttcttgtgtaagattaatctgtacag

SEQ ID NO: 5189 - DNA, 414 bp, Lilium asiatic
  Clone ID: LIB3230-036-P1-K1-H10
gaagaattgaagtttcctgctaaaaagctgagggcactgtggtttgcccctcccgatgctgaccattgtgacagtgcaagccatttcagtgggcctttgccaaggatatttatatccgagctacttgtggatgaactgagttctcagaatcaggaaatcattagaaaatacattaaaacatctggtagcggaaacaagtatgcagcagttgcaagtacattgggaactttaacatggcagaagccgttttattctgattatcaaaacctctccagggaaagtgagtatgcggcttggactcttgttaatggttatgcagtgaatcatgtaactattttcactcatcggctgaagtcccatattagaagtattcaaagtcttaacaaattcattgaagatcatgggtataaattg

SEQ ID NO: 5190 - DNA, 294 bp, Lilium asiatic
  Clone ID: LIB3230-036-P1-K1-H11
cccacgcgttcgaggacgcgtggttttctctgtcggccatctctgttctagctgatgtcattagccgcctaaattcaatacactaatggaaagttatacagcacgcatactgcactgtgctcacatattctctgtatgcacatgtacggatagcatgccctgtatttgaaatgctccatattggtacataactaatgtgttggattggtttttttattgatttttcaaatttatctaaaagtttgtcgctagtgttacatgatccgatcgtttcggaacgtggaaaatcgcaaa

SEQ ID NO: 5191 - DNA, 429 bp, Lilium asiatic
  Clone ID: LIB3230-036-P1-K1-H2
tcgctgaataagaagctgcgagccttaaaaggaatatgggtatatgcggatggcgatgtgacattggaggacgaaaaggccgaaaatgagcaaacatggtctttaaaagaaagcgagcgatccgagcatgacaatgcaaaacctgttgacaagaagagaaatgtaagatagaacaaggaaaccactattaaattgtatgaacgcagtacgaatggatatgatgagggacaaccgaggtcaaagagagcgaatagggcaaagagaagtattaattacaacattgaatctacagtagagtcgacgaatgatctaccaaacgtcttttattaattaaagataataggagtttgtttgttacaacaaaatatagcaggtttattttatgatgtgtaattctgacaatttagtgtgtaatataatattatttac

SEQ ID NO: 5192 - DNA, 209 bp, Lilium asiatic
  Clone ID: LIB3230-036-P1-K1-H3
tcgcccacgcgtccgttcggttcatggtatgggtggaaaaagtctaggcaagggaggagcaaagccattggatggtgcttcttgacaggcatcaccaaactggggtggtgtgaagaggatcagtgggttgatctacgataagactcgtggtgtattcaagatttttcttgaagaatgagatccgtgatgctgtgatttatgctgagcaa

SEQ ID NO: 5193 - DNA, 383 bp, Lilium asiatic
  Clone ID: LIB3230-036-P1-K1-H6
ccacgcgtccgcggacgcgtgggtttctctgtcggccatctctgttctagctgatgtcgttagccgtattcggttgaaaccctaatggaaagttatttgtacgcatactgcactgtgttcacatattctctgtatgcacatgtacggatagcgtgccctgtatttgtaatgctccatattgttacataattaatgtgttggattggtttttttattgatttttcaaatttatctagaagtttgttgttagtgttacatgtgccgatagtttcggaacgtggaagattgttaaagaagaaagaggtctcatcttctaagagatctagagaagaggagaaatattgtttttttttgggacttttggcggggtacaacaccccgag

SEQ ID NO: 5194 - DNA, 407 bp, Lilium asiatic
  Clone ID: LIB3230-036-P1-K1-H7
aaatatattcgaatctccttccactgggaacggtgggagcatctcatccgggggatgtatccaactctacggcttttgtacctttgaggcttgtgtagggatattctggccgacaataatgaagatgagatcccagcacattccacaggaggctaggagcacaatcatgaacttcttacggattcccctcaacatattactgtgcattgcgctttacaatgtgaatgcattacctatcactgtcatgttcagcatgtgctccatttatcttttcatggactaaattttacaaaggcgtcttatgatagtacttgagacacatagatcaaagtctcaagattggacttatctaaaggaaagagatgccgaggaagaacctctgaatgtctaaccaggaaaaaccgatt

SEQ ID NO: 5195 - DNA, 201 bp, Lilium asiatic
  Clone ID: LIB3230-036-P1-K1-H8
aaaaatattcgaattgaggatgggaggaaacagttggatgatgttgacaagggtgaggatgcggctttacctgcatttggagccggtggatattatagggatgttctgagtgaaaagaatgaacataatgtcgatagcaaatgtacatgagtgttagaggtcatgaacaacgcttgtaaccacaagaagggtgaaaatact

SEQ ID NO: 5196 - DNA, 413 bp, Lilium asiatic
  Clone ID: LIB3230-036-P1-K1-H9
aaatggggcaagctataatgggggcccaacaaacagcattaattatggagagggagatagaaagtctacgcaccaagtttaaattgttggagcagaaagttaaagatttggaagaggagaaatatagggagatagaaagtctacgcaccaaggttaaattgttggagcagaaagttaaagatttggaagaggagaaacataaaattctaaatctgagaaacgagagagacctactgaaagatatccttgataagtgcacgccaaaacgacttgtaattgcctttgttgaattaatagagaaagccgacaagtattttgagctcgaggattatctgaaactgcacagtgacataaagcctgacagtgatccagactacatcttaaataccatagttcagagtccagtacggact

SEQ ID NO: 5197 - DNA, 307 bp, Lilium asiatic
  Clone ID: LIB3230-037-P1-K1-A10
aacgtccggcaacactgcaaagcattctgtgattattggggagacttaccgcgggtggctccgggttttttatttttttcagcataataactttgactagttattaacataactggtatcgggactgcctaaccctgctcacccccttgggttggggacttttattgatatataaacacgtcctcatgtgtcactatcatcacaaagtttagagtctattccttattatattgtatttgattttatggtatattattgttgtactgacctatcacaaattttttttacatttcttaatcaaagctat

SEQ ID NO: 5198 - DNA, 405 bp, Lilium asiatic
  Clone ID: LIB3230-037-P1-K1-A4
taagacggcggcaaagccgaagaaggcggcagctaaacccaaggcaaaggcccctgtcaagccgaaggtgaaggccgctgcgaagcctaaggctgttgccaagcccaaggcgaaggccccagctgccaagccgaagcctgcgcccaaggctgcggcgaagccgaagccggctcctcggccggcgccaaaggctcgccctgcaaaggccgccaagacctccgccaaggacgctcccgcaaagaaggctgctgctccggcaaagaaggcaatagtcccaccaccggctaagaaggctgtgcccgcgaagaaggctgctcctgctgccactcctaagaaggccgctcctgcagcgaagaagaggcggcgactccagcgaaggggaagtcccggcgagaaagcacctgc

SEQ ID NO: 5199 - DNA, 153 bp, Lilium asiatic
  Clone ID: LIB3230-037-P1-K1-A5
gcaacactgcagagcattctgtgattattggggagacttattgcttgtttttccttttttcttatttttggcagcattgtaactcttactttttattaatataactggttcgggactgcctaacccgcctcaccccctggggttggggacatt

SEQ ID NO: 5200 - DNA, 260 bp, Lilium asiatic
  Clone ID: LIB3230-037-P1-K1-A6
acgcgatcgaggacgcgtgggcggactcgtgggtggtgatctttcaaccgtttgggcgtcttaggccttgttagctaaaaaatattctcctacatcgctaaccatgctatcttccttcaaactcttgaactaccaaggtgtgaaatcagtgattctatcgaagaacatgttgtatcaagactattcactgttaccttattgaatgttagctactgtcaaaagttcggtgcctcttgtattgttattatttttattaactg

SEQ ID NO: 5201 - DNA, 400 bp, Lilium asiatic
  Clone ID: LIB3230-037-P1-K1-B1
cggacgcgtgggcggacgcgtgggtggggatctttcaaccgtctggccgtctcaggcctcgccagcgaagaaatattcgcctacatcgctaaccatgctggctcccttcaaactctcgaactaccaaggtgtgaaatcagtgattcgatcgtagaacaggttgcatcaagactatccactgtcaccttcttggatgtcagctactgtcaaaagctcggtgcccctggtcttgcgattatcgggaagaactgcaagtctcttgttggactgaagcgcgcaatgcacccattggaggtagtagagaagttctgccaggatgacgaggcccgtgctatcgcaaccacaatgcctaagctccgacatctcgaggtggcctactctcttctgacgactggcggag

SEQ ID NO: 5202 - DNA, 402 bp, Lilium asiatic
  Clone ID: LIB3230-037-P1-K1-B10
cggacgcgtgggcgcggttgcccaaggagctcggctcagaggggcttcaagaattattggtgtcgacattaatcctgaaaaggcagaaaaagggatggagatgggcctcaccgactttatcgacccttccaagtatacaaaaccagttcatgaggtgatccatgagatgaacaaaggaggggtcgactacagcttcgagtgcatagggaatttggacattttccgagaggctttcacatcgactcatgatggtggaggcctgactgtgttactaggaatccatacaaatccgaggttgcttccattgcatccgatggagctccacgggaggagtatccttggatgcgatttcggaggatttaaagggaagtcgcagctgccaggactcgtggccaagtgcat

SEQ ID NO: 5203 - DNA, 322 bp, Lilium asiatic
  Clone ID: LIB3230-037-P1-K1-B2
cggacgcgtgggcgaatggacgcacaaaacattctactgcatgggggcttctgtgtcatttattgtcgctgtaataagtccagcttggatgcactttggtcaggattttcatttgcctgctttgttgaggttcctgaagaatcacatccagtgtaccccgctcctacctcgtctttggaatatagtcgtttcattaattacaggtgaattttatcacggtcatattatagaagttttgagctgtggggcataattcgcttgtaaactactttcatcattaaaaatgctcatactgcacttttttcttctgattaccattcac

SEQ ID NO: 5204 - DNA, 180 bp, Lilium asiatic
  Clone ID: LIB3230-037-P1-K1-B3
actttcgattgaatattcaagatcctttatctattaaggttttccgtgagcgggtgtagttgaccttttaaaatcaccatctttatccattttgttctatatctatctagatatctaacatctcttttatctattatattctatttaaaaatatattcatataactgtttaatgttttaa

SEQ ID NO: 5205 - DNA, 302 bp, Lilium asiatic
  Clone ID: LIB3230-037-P1-K1-B5
gggaggcttgggcgattggaagcacaaagcattctattggatcgtacgcttctacgtccttcattgtggctgtaataaggccagcttggttgcgctttgttcacgattggaatatgcattctatgccgtggtatctatagaatcacagctagagatccgcactcctacctcgtgtatggaatggacgtgtctcattcatgacagtggatgattatcagggtccgatgatagaagtcttgagttacgcggcataatgcgcaggatgcctacttccataaatgaaaatgctcatgcatcatttt

SEQ ID NO: 5206 - DNA, 407 bp, Lilium asiatic
  Clone ID: LIB3230-037-P1-K1-B8
atcagcttttcagctggcctcgggaaggggtgccttagctgacgaaatcatgcgaggggtctgtgtggagctatgtgacatctttctaagttgtgatgctcttcaagttggtatgaatcttgttcaaacggcaatgaggacggtacatttcgctcaaatgagagcggagcctcgattgttagagccgatttacatggtcgagtttgaagctagaaatgttgtactcagaaaagtttgtgatcttctttatgacagagatgcatattcggttgaaactagtcaaaactccgaattcagcgttgtcaaggccttccttcctgtcgccaagtcacatggcttttttgagcaggttaggattataacctcaggaactacttttgtaaaagttgttttccaccattgggact

SEQ ID NO: 5207 - DNA, 400 bp, Lilium asiatic
  Clone ID: LIB3230-037-P1-K1-B9
ggaagattctacatttaagattcaagtagttttattaattagggtttcggtgaacttctttagtttaccttcagagagcacgatctttatccattttcttctagatctatctagatttcttaaatctcttttatctattatattctatttaaaaatatatttatataacttttttatgttttaattgtagatcaaaagaaggagaatcatctagatagatcaagatcccctctctctggatgatgacatcaaatgaagaaacaacctcctccatccgtctgaatgatggagacagccactggaggtgaatgttcgagatggagaagatgctagataaagtagagcataaggcagtgaggttataaaaggacctgagatgataagaggagtcggtgagagc

SEQ ID NO: 5208 - DNA, 329 bp, Lilium asiatic
  Clone ID: LIB3230-037-P1-K1-C1
tcgggccacacgttacattcaacatccacgttctgcgattaatttgggttgaggcgaagggggtgagtggacctttatagagcacgaactttatccatttttttctagatctatctagatttcgtaaatccctgatatctattatattctatgtaaaaatatatttatataacttacccatgttgtaatagtagatcaaaagaaagagaataatctagagcgatcaagatccccctcctgtgggtgatgacttcaaatgaagaaacaaccttcatcatccgtctgaatgatggagacagtcgctgcaggcgaaatgttcgcgatggtaa

SEQ ID NO: 5209 - DNA, 405 bp, Lilium asiatic
  Clone ID: LIB3230-037-P1-K1-C10
cggacgcgtggggacggaagagaggaggaggatgtggtgccagtcatgccgggaggagtacgaggagctcgacgccggcacgtgcaaggagtgctacgaggaggcgagcgagacggaggaggagctcaagcgtgagatcgacgacctcaaggccaaggtcgccttcctccgcctctcctcgcccctcgaatcccacctcccccatgcctccccctcatcctccaccgacgtcctcctccacgcctcctccgactccccctccgccggcgccgccgtctacacccccgccgttccggcccaccgcgccgtcctcataagcaggtctcccgtttttaaagctatgctggaaaatgagatggaagagagtaggagtggcattatcaagatctatgatgtctcatacga

SEQ ID NO: 5210 - DNA, 222 bp, Lilium asiatic
  Clone ID: LIB3230-037-P1-K1-C12
aaaaaaaaaaaaaaaaaaaaaaaaaagaagaaaaaaaaaaaaaaaaaaaaaaaaaaaaaaaaaaaaaaaaaaaaaaaaaaaaagcaaaaaaaaagaaaaaaaaaaaaaaaaaaaaacaaaaaaaaaaaaaaaaaaaaaaaaaaaaaaaaaaaaaaaaaaaaaacaaaaaaaaaaaaaaaaaaaaaaaaaaaaaaaaaaaaaaaaaaaaaaaaaaaaaaaaaa

SEQ ID NO: 5211 - DNA, 162 bp, Lilium asiatic
  Clone ID: LIB3230-037-P1-K1-C2
gcggtttattggggatccgccgactgtgaatacttgccacgaggggtcattgaggctgtttcacactcggctttctaatattccttggcgctttcaggactttcggaaagagcttcgacggtggaaaccttatattggggattttgcatgaactgaaatttt

SEQ ID NO: 5212 - DNA, 400 bp, Lilium asiatic
  Clone ID: LIB3230-037-P1-K1-C3
gcagtatatcgtggatccgccgactgcggagacgtgccaggagctgtcgaagaagctgttttacactcggcttgctaatattcctttgcgctatcaggagttttggaaagagctcgacggtgtgaagcatatatggaggaataggcaggaactgaaggttgaagatgctggtattgcagccctcttcgggattgaattgtatgcgtggttctgcgttggtgagattgtagggaggggtttcaccctcaccggctactatgtttgaagtagccaccagaaattagaaatgttgcttcactctctttatgtaggttcgttattggttgttgaggtgatcctagaccgtgacctcatttttttatatccgaattttggtttcccgggagatactgagctggtg

SEQ ID NO: 5213 - DNA, 406 bp, Lilium asiatic
  Clone ID: LIB3230-037-P1-K1-C4
cggacgcgtgggcgaatggaagcacaaaacattctattgcattttacgcttctttatcatttattgtggctgtaataagtccagcttggatgcactttgttcaggattttcatatgcatcctctgttgtggttcctgaagaatcacagctagtgttccgggctcctacctcgtctttggaatgtagttgtttcattaatgacagtggatttttatcagggtcagatgatagaagtattgagttgtggggcataatgcgcaagaagcctactttcatcattaaaaatgctcatgctccactttcctctcctgttgaccattcacataaccaagagaatggggggatccctaatggtggtatagcaggttcctgaagaatcacagctagtgttccgggctcctacctc

SEQ ID NO: 5214 - DNA, 308 bp, Lilium asiatic
  Clone ID: LIB3230-037-P1-K1-C5
ctactaggaggctatcgttacggatgaggagctcaagcgttagatcgacgacctcaaggccaaggtcgccttccttcgactctacttcccctcttatccacactatcacatgtctcccccatcatcttcccttctttttagtttttagtattatcgactccccctccgccggcgccgccgtctacacccccgccgttccggtccaccgtgccgtccttataagcaagcctcccgtttttaaagctatgctcgaatatgagtatgattgtacatcttagtggcattatcaagatctatgatgtctcata

SEQ ID NO: 5215 - DNA, 404 bp, Lilium asiatic
  Clone ID: LIB3230-037-P1-K1-C6
aatgcgcattatatacttatcaaagttcagttaacaacctcaaaatagggaatagtttagactagcccccagttttaaaattttatcaatatttctaatcacattgcagggctaacaagaagcaaaccactcctttttatttaattgtgaatatttccaatcgcaatgtttccacactacaaatagaaactatcaatatgtatccttatttccaaagcccgatacatatcttgattctgacatttctatcctgggataaaacaacaaacttccctataaacgagaagttgaggctcatttgctccattcaaccaaggatagatccaagtattcattagcaaagttcttctcccttgtgtgttctcttcttcctctgtcttcccctcatctcacaaaagacgtga

SEQ ID NO: 5216 - DNA, 403 bp, Lilium asiatic
  Clone ID: LIB3230-037-P1-K1-D1
gaacgtcggaggcgagctggggttttgtggcggaggagggatgggacgaggaggaactatggtggtcgcctcagagcgagatgactggaatgcagcccaatggttttgaggatttcagggataatattgagcatctttgggtgaagttggagaatattgccgtcatgatggaacaaatgttggtagatcctaatattcaggtagcaccagatcaacttccagagattactgctaatggctcagctttgtgttttcataagagtgggagagaacatggcatctgccatgagcacgacctccttcgagtattgataaagaatgcaacatgctcacatgcactagctctccatatgtgtatatctgattcaacctttcatgtgtactctaagcaaggtcggatatt

SEQ ID NO: 5217 - DNA, 381 bp, Lilium asiatic
  Clone ID: LIB3230-037-P1-K1-D11
ggatacaccaacagagactagctcacctatcaattggatcaacaagctgaaaatggggatcagcaagctgaaattgtagattttttcttgttggtacaaaagtggtccgataacccattattgtcatcatcacgactctatatctcgtttgtggttatcactctcatcctacaaaaatgtgtctgcgttctgtcttcgaaaaatcaccttgtatgtattagttggtatataataacatattagaactctcactctcactctctctcaacaagcttttggtcctcatatatcggtgtctccggttatctaactgtcaccatcctcgttatcatcatttccatatacttttcaagatggtattatagcggtatcatcattttc

SEQ ID NO: 5218 - DNA, 350 bp, Lilium asiatic
  unsure (1)..(350): unsure at all n locations
  Clone ID: LIB3230-037-P1-K1-D12
cggacgcgtggggacggaagagaggaggaggatgtggtgccagtcatgccgggaggagtacgaggagctcgacgccagcacgtgcaaggagtgctacgaggaggcgagcgagacggaggaggagctcaagcgtgagatcgactacctcaaggccaaggtcgccttcctccgcctttgctcgcccctcgaatcccaccttccccatgcctacccctcatgctccaccgacgtgctagtgcacgcctcctccgactccgcttacgccggcgccgccgtctacactcacggcgtttcggtccatcgtgccatcctgataagcaggtgtnccgtttttaaagctatgctcgaaa

SEQ ID NO: 5219 - DNA, 402 bp, Lilium asiatic
  Clone ID: LIB3230-037-P1-K1-D2
cagctcttctctctcagcaatggggagaaaaccagtgagatacgtggtggtggatgcgttcaccagcacggcgttcaaggggaatccggcatccgtgtgctggctgggggaggaggagcacgatgaggagtggatgcgctccgtcgccaaggagttcaacctcgcccagaccgtcttcctatcacgtgctaccgcggaatcgccggacaaccaccatcctcgcttcaatctccggtggttcacccccgttgacgaggttaaactctgtggtcatggaactttagctgcatcacatttccttcttacatctggtttaacaagaggcgatgtgattgaattcaacacaaagtcaggactgctagtagccaagaaagtctatgcacagagtcgcctaggcaactc

SEQ ID NO: 5220 - DNA, 404 bp, Lilium asiatic
  Clone ID: LIB3230-037-P1-K1-D3
gccgctcgttggcgccctgtgcgtgctcagcctcggcgccttctccgcactcgcctaccggaccgagttctctcagccgttccgtcgcctccctctcatcaggtcaaagatcgcaactcaatcaagcttcagagctcttcattcctctgcaatggagactggttccagctcagtagccgcaattgtggtctatgttactgttccaaacaaggaagctggcaaaaagctctctgaaagtattattacagaaaagcttgcagcttgtgtaaatcgagtaccaggcatcgagtctgtttattggtgggatggtaaggttcaaacagattctgaagaactactgattatcaagacgagggaatccctcctggatgctttgacagagcatgtaaaagccaaccatgaat

SEQ ID NO: 5221 - DNA, 134 bp, Lilium asiatic
  Clone ID: LIB3230-037-P1-K1-D4
ggggttcgttgtcgaatcggcggccaaaaacacctgatgctactgaccgtagaaggacattcacagggtgttatataagatcagtttggacgctcagtactgacggaaggagttcgactactcgaaggatatat

SEQ ID NO: 5222 - DNA, 411 bp, Lilium asiatic
  Clone ID: LIB3230-037-P1-K1-D5
cggacgcgtgggcggacgcgtgggcttctagtttgtcatcgatcccctccgccataccaatagatggagattgtagtttgaaatcagtaaaatcaagtttagacattacgggtataatctctcacgaagagcttagatcaaaaggaacgagatcagtttttgctactcgacctgttatcaagcagagatcattgtcacctcttccgacaacagtgcttcctgaatcattcaaggaagcaagagcaaataagaagcgcttctcgaccccgccccctagcaggagaggatcaagtacgtacgtctttgctaaattattctcccgagaagtgagtagtctccgcaagcctgcatcgcctcctgcaatgaatcatctgcagcatatgctctcaaagaaaacatcttctaaggtga

SEQ ID NO: 5223 - DNA, 103 bp, Lilium asiatic
  Clone ID: LIB3230-037-P1-K1-D6
tcgggatacaccaacagagactagctcacctatcaattggatcaacaagctgaaaatggggatctgtaagttataaattgtttagattttcttgatgttgtct

SEQ ID NO: 5224 - DNA, 120 bp, Lilium asiatic
  Clone ID: LIB3230-037-P1-K1-D8
cgacgcgtaggcgaatggaagcacaaaacattctattgcatcaaacgcttctgggtcatttatggtggctgtaataagtccagcttgtatgcactttttacacgatttatatatgcattc

SEQ ID NO: 5225 - DNA, 414 bp, Lilium asiatic
  Clone ID: LIB3230-037-P1-K1-D9
gctcgatgacatgccatctgtagatctgaagactggcatggagatcacagaagcattgcgtctccaaatccaagtccagaagcaacttcatgaacagcttgagattcaaaggaagttgcagttaaggatcgaagaacaagggaagtacctcgagatgatgtttgagaaacaatgcaagtctggtgtcgacaagttatggacaccctcttcccatgaggaacctccttcccaaacttcagatctagctcctacgaagaaggaaccctcggagaagcatcaagacgataaaggaaagcacccggcgaccgctatactaatagaagacaactcccaaagcacaggcaaggagcgaaggatgcgtgagcctggaaatgacagcgaggcgagcccttcgatagagtcgctgtcaccgtc

SEQ ID NO: 5226 - DNA, 201 bp, Lilium asiatic
  Clone ID: LIB3230-037-P1-K1-E1
caaatttcgaacggtagaagggcttgttgtgcattgcagagtctcgagtttaatagacctgtattatgtccaaatgtaaccactcttaataccttgcctcccttgtaaagatattaccgcgtttgagcaccgaattttaacttgttaggagagggtactgccctgaaatcaggatacatgcatgtttttcattttgtttta

SEQ ID NO: 5227 - DNA, 141 bp, Lilium asiatic
  unsure (1)..(141): unsure at all n locations
  Clone ID: LIB3230-037-P1-K1-E11
gaggtttattgtctaaccaatggctagaaaaccaggcagatacctgtcgaaggatgcgtnttccagtatgttttacaatgttaattcgctctcccagtactgtttgaaggaggacgagcacgagtagcatatattgcgcta

SEQ ID NO: 5228 - DNA, 182 bp, Lilium asiatic
  Clone ID: LIB3230-037-P1-K1-E12
gtctcaccataggctggaaaaccagttttttacctggtggtggaggcgtttaccaggcacgtctgttaaggtgaatccgccttctgtggtctggctgaaggaggtggagcactatgaggagagattgcgctatttcgccaaagagttaaatcttagtccagaccgttttactattacttgct

SEQ ID NO: 5229 - DNA, 294 bp, Lilium asiatic
  Clone ID: LIB3230-037-P1-K1-E2
gctgtttggagacgcacagagcttgattaacatttgcctcgtggctccactagggtacgggtccaggctgactgaaacttgtgcttgtggttctttcttttgatttaaggacccatctcattgaaactttagatctctgcttccctgttcatttattaatgtgtttgattgagcagaaggtgggtgtttaactgctgatttgccaacaactaaaggtgaaaatatatttggagaggtattatgtacagattagatactttaagagcgagacaaatactagggatgtggatatgg

SEQ ID NO: 5230 - DNA, 402 bp, Lilium asiatic
  Clone ID: LIB3230-037-P1-K1-E3
gtgaagaggaatgaggggtgggtgaaggagctggagattatggtcaagacacggcagaaagctgagattcaggctctcagctccttcggatttcaatatcttactgaggtctacttgccgttgaagttgcagcagagggattggctctgaatgtgcctaatctggttgaaattaactgtcttctggattgcaaaaagggaagtgtgactgactagacggagaagcttggtgcggagtttacagacagtctagaaacaaagagggtctgctggtgtctttttaatttggaatttactctacttttacttgctacaaaactcagagaaccttttgctagctgcttctcttgttttcttatttccatgtattgtgatatgctaaatatatatttgtgttgtatgg

SEQ ID NO: 5231 - DNA, 403 bp, Lilium asiatic
  Clone ID: LIB3230-037-P1-K1-E4
cccacgcgtccgagagcttctcagttgagacaattcttgatcagattctgaggaaccttacttttgaggagcaacaaattctgtacctaaagcttgggaagatgatccaggagaggttgttgaggcaatcatgaagccccattatggaccagattccttgcgtggcatgtatatagtctggtgcttttaagagctcattttagataaccccgttttagcttcatgttaagcatgtccatatagtgctgcttgtagctttctgctctgatatgcaccagaatcacatgcactgtgattcagatgtgccgtgcacgctgtattgttttgctcctatgaaatggatgtaacataaaatgcttgttgagcttgagtttttggtaagttgaacggtcatggcatagat

SEQ ID NO: 5232 - DNA, 405 bp, Lilium asiatic
  Clone ID: LIB3230-037-P1-K1-E5
cttggatgctgaagatgatacagcacaaatatccactcaagctgttgtgaagaaagaatcagataaggtcaagagaaaaggtgcactttcaggggaaaaagaaatcttgaaagttgatgaaaaccttcagaaaaataatttgacacattcagaggagtatagaatgcctcttgtgtggattgacttggaaatgacgggtttggatgttggagttgatcgtattttggaaattgcctgtgttataacggatggcaaactaacaaagtcagtcgagggtcctgatttagttattaaacaatccaaggagtgcttagataacatgggagattggtgtcgggaacatcatggtgctagtggattaacggagaaagttcttcaaagcacaattactgagaaagatgccga

SEQ ID NO: 5233 - DNA, 372 bp, Lilium asiatic
  Clone ID: LIB3230-037-P1-K1-E6
ccacgcgttcgagagcttatcagatgaaacaattcttgatcagattctgaggaggcttacttttgaggagcaacaaattctgtacctaaagctagggaagatgatccaggagaggttgatgaggcaatcatgaagcctcattatggaccatattccttgcgtggctatgtatataggctggcgcttttaagagctcattttaaataaccccgttttagcttcatgtatatcattgtccatatagtgctgtttgtagctttctgctttgatatgcaccagaatcacatgcactgtgatttacatgtgcctgtcacgctgaattgttttggttcttcgaaatcggtgtaacattaaatgctttttgagcttgtt

SEQ ID NO: 5234 - DNA, 133 bp, Lilium asiatic
  Clone ID: LIB3230-037-P1-K1-E7
tgacgtaccagcagaacatatagtgagacgtattagggctgaagatgcataacgttgaacgatcgttcgccgagaagcactactcggatctgttctctaaaccattctttgacagtctggtgtaatatattat

SEQ ID NO: 5235 - DNA, 407 bp, Lilium asiatic
  Clone ID: LIB3230-037-P1-K1-E8
aggagatgcatcttctaaatcaataccaacaccgtctttgagcagcagcagtcctgaaaagccagacggtactcctgtttcccttcccaatggggttccttctgtccctgaacaagacacatggtctgctacccaagaaagagctctcattcaggcgctaaagacattcccaaaggatgtgaatcagcgttgggaacgggttgctgctgctattcccgggaaaaccatgaaccagtgcagaaagaaatttttatcaatgaaggaggacttccgaagcaagaagagtggctaagtcttttttcttttgcaggtaagttcaatatagaactaaaaaaaggtgacctcttcatcatggtgctgaaatttttctcattactgggcttagctgcagatatatctgagtgctc

SEQ ID NO: 5236 - DNA, 309 bp, Lilium asiatic
  Clone ID: LIB3230-037-P1-K1-E9
aggacacgcatatgataaataaatacaatcatcgtattggatcagaagcatctccggtaaagccaggcggcactaatatttcccttttcaatgcacttccttctgcccctgtacaacacacttttttttgttgccaaataaagaatttcaattcagcgctctacagacctacccaaagtttgttattcatcgtagttaactcatttgctggtgttattttctgtaaaaccatcatccagtgctataagaattttttattaatgaatgtgatcttttctagctagaatttgcgtttaattttttttattt

SEQ ID NO: 5237 - DNA, 260 bp, Lilium asiatic
  Clone ID: LIB3230-037-P1-K1-F1
ggatacaccaacagagactagctcacctatcaattggatcaacaagctgaaaatggggatcagcaagctgaaattgtagattttttcttgttggtacaaaagtggtccgataacccattattgtcatcatcacgactctatatctcgtttgtggttatcactctgattctacaaaaatgtgtctgcgttctgtcttcgaaaaatcaccttgtatgtattagttggtatataataacatattagaactctcactttcactc

SEQ ID NO: 5238 - DNA, 412 bp, Lilium asiatic
  Clone ID: LIB3230-037-P1-K1-F10
aaagaagatagggaagttactggattcaaatgggttggatatgtcaaaggcatttatgcttgatacacaagatcaagctgaggcgaagtataagaaatgggagaaggagcctgctccatatgggtgggatgttttcaatcagaaaacactgtatgatgcatacaaaaagcgtacaaagaacatagtgtgtgatatggaggcatacaataaagcgaaagaagctgatccagagttttatcgtgatgctgctagtcttcagtatgggaagagaacaaagactcctgacgagaacattgataggatggtgaacgagcttgaagagacgaagaaaaagcgcgaggcattcagcaagaggcgcacgttccacgaagagaatgatgttgactcgattaacgacaggaatgagcatttt

SEQ ID NO: 5239 - DNA, 135 bp, Lilium asiatic
  Clone ID: LIB3230-037-P1-K1-F11
gaagaatattggctcgccactggttacaaaaccagtgaattacttaatggtagatgcgtttaacacacaggatcaaaatgtgactacgtcttctaaatgctagtaggagccggttcatcactgtaaggatatatt

SEQ ID NO: 5240 - DNA, 405 bp, Lilium asiatic
  Clone ID: LIB3230-037-P1-K1-F12
atttgtcggagaaggtgcggaagcgtgtagaggccctaaaggagatccagagccaacatgatgagttcgaggcaaaattcttcgaggaaagagcagcacttgaagccaaataccagaaactatatgaaccactatataccaagcgctatgaaattgtgaatggtgtggtcgaagtggaagatgttatgactgaaactactgaagcaactgctgaggataaaagtagcgaagaaaaaggtgtgccagatttttggttaactgcaatgaaaaccaatgaggtgcttgctgaggagattcaagagcgtgacgaaggagccttaaagttcctgaaggacattaaatggtgtaaaattgaagaaccaaagggtttcaagcttgaattttttttcgatccaaatccctttt

SEQ ID NO: 5241 - DNA, 404 bp, Lilium asiatic
  Clone ID: LIB3230-037-P1-K1-F2
acgacggcggcaacctggtcgtctacagccctaaggccgtacccctttggcagagtggcaacggaaccacaggaggggaatatgtcatcctccttcagaagaacggagatgccgtcatcttcggcactgctaaatggtgggtggtatggcctactttgaacctagtcgcctctaacaccacagcgcccccattagaaggtaatgaagaagcaaccctattatcagctatgcctgaacctgctaatgtaccggacacctgggaaagcccagaaactagtgaatccctcccttgggaacataatgttttgtacacttgggaaaccctaaaaaccggtgaatccctcacttgggagacatacagatgcacgatgcaaaccgactgcaacttcgcttgttggaatggt

SEQ ID NO: 5242 - DNA, 404 bp, Lilium asiatic
  Clone ID: LIB3230-037-P1-K1-F3
cgattgcccaggttgtggccgagtccaaagttaaagacaccgataagaggaagcggaattctactgaaaccgatgagctttaaatcggtatgaagaactacgacccccagaaagacaagcgtttcattggctctgtgaagttgccgcatattccccgaccgaagatgaaggtctgcatgctcgtagatgctcatcatgttgaggaggctgagaagattgggctggactacatggatgttgaaaggctgaataagatgaataagaacaagaagctggtcaagaaacttgcgaagaagtatcacgctttccttgcatctaaggccatcattaagcagattccacgtcttgtaggcccggtgcttaacaaggcagggaagttccatacactggtgactcatcaggaa

SEQ ID NO: 5243 - DNA, 79 bp, Lilium asiatic
  Clone ID: LIB3230-037-P1-K1-F6
ataagatgctgtagattatacatcatatatctacagtcacgctggtgtgaagaaggaataccttatggtcaaaagaaaa

SEQ ID NO: 5244 - DNA, 405 bp, Lilium asiatic
  Clone ID: LIB3230-037-P1-K1-F9
gttgaggaacaagatccaggcggagtttcgctggtgggatcaagttgatcagttcctattgcttggggctgttccttttcccaaagacgttccatgcctgaggcaacttggtgtacgtggtgttattactctgaatgaaccgtacgagactttggttccgtcatctctatatcaggattatggtattgaacacttggtaattcccaccagggattatctttttgccccgtcgcttgtggatatttgtcgtgcagtggattttatccacagaaatgcatcccgtgggaggaccacatatgttcactgcaaagccgggaggggacgtagcaccactatcgtcctgtgctacttggtggagtacaagaatatgacacctgatgctgctttggattatgtgcgagcaag

SEQ ID NO: 5245 - DNA, 401 bp, Lilium asiatic
  Clone ID: LIB3230-037-P1-K1-G1
gttcttccacgttcgatcgccggccaatatcgccggaggctcctgttcttcgatcaactccccctccttctcatgtctcatctcttcttaggtatattctcgtgattaagatttctaatttatgtttgattttgtttcaggtatttaaagatgatgaattcaagcagtggaaatagtagcgcttctctggacgacggcggtggacggtgctggcctcctctactggttcctctgggtgattgaagccatcgaggtatagcgcacgagcagagatgccagcacgatagcagaaccatgcaggactcccactccctagagcaccggcatggccgtccgagatccctgccattcccagtacaggaggctctatcattctcggaatcaattcatccatactattt

SEQ ID NO: 5246 - DNA, 414 bp, Lilium asiatic
  Clone ID: LIB3230-037-P1-K1-G10
cggtaccgtcgagatcaagaactcctatgcggttccccacagcgagtcggaggagcaggtggcaatggatattgaataccatcataacatgtatatgtctcaccaaaaggtgaatccgaaggaagtacttgttggatggtattcaaccgggtttggtgtctcaggggggagcacattgatacatgaattttattcaaaggaaacaacaaatccagtccatttaactgttgatactggattcacacatggagagacgtcagtcaaagcatatgtggctatcaacttatctctgggcgatcgtcctcttgctgcgcagttccaagaaattcctctggatacacgcatgattgaggccgaacgagttggatatgaaattttagaaaagactgtagtggacaaactcccgaatgatct

SEQ ID NO: 5247 - DNA, 402 bp, Lilium asiatic
  Clone ID: LIB3230-037-P1-K1-G12
agaagagggtggtcgccatgcaaaagcctggcagggggccgttcctgggaggaattgcgacccagcagcacaaggcggaggaactaagggagcgtgggtacaacatggtggctggcggtgtggacgtgggattgttcaggcaggcggcagtggaggatgtaaagaggttccggagtggagcagcgagtttggccagcaaagcgaacggagttcacgttccatcagcagcttagtgaacaagtgggagagcaatattaagcacaacaaatatattggttctttgattctttatcactttaaagtaggtgtgtaatgcaagttggacttactatttcgtgcaaaattaagcataaaacagtaatttactgttttaaacttgaatgtaaccttcttgcataatgt

SEQ ID NO: 5248 - DNA, 144 bp, Lilium asiatic
  Clone ID: LIB3230-037-P1-K1-G2
tcattcgggggagtccggtctagaggatccaatcttatttacgcgggcatgcggcgtaatgggggttctatagggtcatataaaatcaatccactgaccgtcattttacaccgtcgggactggaaaatccctgctgtacctatc

SEQ ID NO: 5249 - DNA, 417 bp, Lilium asiatic
  Clone ID: LIB3230-037-P1-K1-G4
ttcttatggaagtgaaataagaaaacatatgatgttaattttttcatgatccaaagagaattattggttccttaccctccgaatggataaacgcatcaaactgtagtgattctcatataacttctacccctgtgctactaaagtgggaccccaagactatgaaaggtgcaaattaaatgtactatttgtgttaaagttagcagggcagaaggtgatgcgaagatttaaagtggagatgaattctatcattgttatcaatctcatttcttcttaacaaggcatctccttttgtctattggcacccatcattataaattgtcgtgatctcatggcgacattttggagtgtcaaatgcaacatatttttaggcagaagaattgtgttgctaatatacttgctcaacatagtcacataaat

SEQ ID NO: 5250 - DNA, 58 bp, Lilium asiatic
  Clone ID: LIB3230-037-P1-K1-G5
accccgaaaccccggcgcgacccacgcgtccggccatttgtatgaagaacttctattc

SEQ ID NO: 5251 - DNA, 400 bp, Lilium asiatic
  Clone ID: LIB3230-037-P1-K1-H1
gttcttccacgttcgatcgccggccaatatcgccggaggctcctgtgcttcgatcgactccccctccttctcatgtctcatctcttcttagggatatactcgtgattaagatttctaatttatgtttgattttgtttcaggtctttaaagatgatgaattcatgcagcgtaaatagttgcgcttctctataccacggctgtatacggtgctggccttctctactgatatctctgggtgattgaagccatccaggcataccgcaagagcagagatgccagctcgatatctgaaccatgccaggactgccactcgctacagcaccggcttggtcgttcgagatccatgtcattagcagttcaggagggctctattattctcggcatcaattcatgcatacta

SEQ ID NO: 5252 - DNA, 298 bp, Lilium asiatic
  Clone ID: LIB3230-037-P1-K1-H11
cggacgcgtgggcgaatggaagcacaatacattctattgcattggacgcttctggatcatttattgtggctgtaataagttcagcttggatgcactttgttcaggattttcatatgcattctctgttgtggttcctgaagaatcacagctagtgttcctggctcctaccttcgttttggaatgtagttgtttcattaatgacaatggatttttattaaggtcagatgattaaagtattgagttgtggggcattatgcccaagaagcctactttcaatattaaaaaatcttatgcttca

SEQ ID NO: 5253 - DNA, 401 bp, Lilium asiatic
  Clone ID: LIB3230-037-P1-K1-H2
cggacgcgtgggttgtaatgctcgcccatagcagcataccgaatgattcactatgctttgttgaatgattcactgcattatgtattaaattatttactatatgctttaattctagttactttactaaatgctttattgtattatgcttgtctagccaattatttaatgatgttgaatgttctattgttgaatgctctaatctcttagtgactgtgttgtagaaatgagcctaacatgcatttgatacctcctacaagaatgataatattacaaacaatatggccaagtccttcaatttatggttgggtgagctaagatcgaagccggtagagaatcttcaagaggaagactgaaggacaaggttagatatatgatattacgccaacaattagagaaagact

SEQ ID NO: 5254 - DNA, 141 bp, Lilium asiatic
  Clone ID: LIB3230-037-P1-K1-H4
cccactcgtaagagaaccgatgatcgctatccctaaacccaactcaaggcccctgggcaatcctagggttattttatcatacaagttctaagtactatcaaagcctaaaacaacagcatcatctagtcatatagacgtctg

SEQ ID NO: 5255 - DNA, 211 bp, Lilium asiatic
  Clone ID: LIB3230-037-P1-K1-H6
tataaactgcaagacatgaacaagctttcaaaggaatgggaaatgaaggtaaaggcgctcaataaaaggcttgaagatgtgcaagtggaacttaacaagcacatggaccaacttcagaaagatgcgattgatcctgaaaaacttcaagctgctttaagcgatgcgtctttgactgatgcttgtgatatgaaaagagcaaaggagatggtgt

SEQ ID NO: 5256 - DNA, 418 bp, Lilium asiatic
  Clone ID: LIB3230-037-P1-K1-H8
ctcttttccaactccaaatgcaagcggtacttccacaaccgtctgaagccagcaaagctctcttggacggcaatgttcaggaagcagcacaaaaaggatatacatgctgaagctgccaagaagaggcgtcgggccaccaagaagccatattccaggtccattgtcggtgccactttagaagtgattcagaagaagagaactgagaagcctgaagtgagggatgctgccagggaagcagctctgcgagagatcaaggagaggataaagaagaccaaggatgagaagaaagctaagaaggcagagaccgtgtccaagactcagaagacgcaggccaagagtagcatgcccaagaccgccaaaggaccaaaacttggcggcggcggtgggaagcgatgatagctctgatgcatatcattgg

SEQ ID NO: 5257 - DNA, 263 bp, Lilium asiatic
  Clone ID: LIB3230-037-P1-K1-H9
cgtattccacgttcgatctgctcccactttccacagaggctcctgggcgactatggggtatttcatgttttaatgcatcatctattcttaaatatattatatacattaatacttgtaatttatcttcaatctttattgatgtatattatcataatcaatcttatcatcttaaataatggttcttctttgaaagtccgtattattctagtactagttttctttactttaattttatctttatttactttatcttattataaacc

SEQ ID NO: 5258 - DNA, 155 bp, Lilium asiatic
  Clone ID: LIB3230-038-P1-K1-A11
gagctaaccgagacacatggatttatttacatacctcaaccaatagaaggagggcttttttatcacatattacataaaatacaatccggcatataactactattcaaagagtcactcttaaacctatgcaaaatcatgcattaacataaagctca

SEQ ID NO: 5259 - DNA, 424 bp, Lilium asiatic
  Clone ID: LIB3230-038-P1-K1-A12
gaacgagattatgctgatggaagggatacagagtatggccacattgagccaattcctgcaagacagaaatcatatgatgattccatgaagcacaggcacgatgatgactatgatcgtcatccaaagccgtatggtgactatgatcttatccaaccccaagctcttgatgaggatctgcgtgaccaggacccagtgaagcgccacaagtctgattataatgatcacgacttatatggtaagctgcatcacgagggatttcaaagtggatttgtgcatgcagatcctgagccccgtgaagagggtgaagcttatgaagaatacgataatgattaccgtcgtgctgagtgatctctctcccatgagtacaagggctgagaatgtctttcaggtatctttcttgcttcggagctgaaagcagcgctgt

SEQ ID NO: 5260 - DNA, 441 bp, Lilium asiatic
  Clone ID: LIB3230-038-P1-K1-A2
gctagatttagaaaatgtagtaagatttagggaatgtagtagagatggcaactagatagtagatacccccattaagatgacactgttacaatgaccgttgtggagggcaacccacatgcgtagaccaagtccaaggttttgagtttcagtttcaggaatggattgatcgtccgcccaagcgatctagatcagctacatcagctgtttcagcttgggctttgactttttagggcatgtttggcaatcgagtcattttccctggaacgggataattccccgtggggtttcctattggggattttctttactaagattttcctcggtttatgtttgtcatttaagttggttttacctagagaaattcaaactcttgtttgttaattaagtcattcttcctttgaaaatctacacatatacaacataattcaataaattaaatac

SEQ ID NO: 5261 - DNA, 431 bp, Lilium asiatic
  Clone ID: LIB3230-038-P1-K1-A4
gagggctgtataaaggactggttccactttgggggcgtcaaattccttataccatgatgaagtttgcatcttttgagacgattgtggagatgatttacaagtatgccatgcctgttccgaaagacgagtgcagcaaatctctccagcttggagtgagctttgctggtggttatgttgctggcgttttctgtgctattgtttctcatccagctgacaatcttgtctccttcctcaacaacgccaagggtgccactgttggtgatgctgtgaagaagattgggatgttgggtctgtttacacgaggccttcctctccgaattgttatgattggtactctaactggagcacaatggggcatttatgatgcattcaaagtcatggttggcctaccgacaactggtggagttgcacctgctgctttaccgccccct

SEQ ID NO: 5262 - DNA, 430 bp, Lilium asiatic
  Clone ID: LIB3230-038-P1-K1-A5
ctctcctccaagtgaacctcctataacttagatgtctactagctcggatgggcagtggttagctgctatcaactgttatggtgatatctacatatttaacttggagattgataggcagcattggttcatagccagattgaatggggcttctgttactgcttgtggtttcccccctgccaacagtaacgtgcttgtcatcacaacatcttcgaatcaagcctatgtatttgatgttgaagcaaaacagttgggtgagtggtcaaggcgccacacaccttctctacctagaaggtttcaagaatttccaggcgaggttattggtctatcttttccaccttcaaaatcgacatcagtgatagtctatagtacaagggcaatgtgcttgattgacttcggtatgccaattgatgaaagcgatgatatactgtcc

SEQ ID NO: 5263 - DNA, 425 bp, Lilium asiatic
  Clone ID: LIB3230-038-P1-K1-A7
gctagatttagaaaatgtagtaagatttagggaatgtagtagagatggcaactagatagtagatacccccattaagatgacactgttacaatgaccgttgtggagggcaacccacatgcgtagaccaagtccaaggttttgagtttcagtttcaggaatggattgatcgtccgcccaagcgatctagatcagctacatcagctgtttcagcttgggctttgactttttagggcatgtttggcaatcgagtcattttccctggaacgggataattcctcgtggggtttcctattggggattttctttactaagattttcctcggtttatgtttgtcatttaagttggttttacctagagaaattcaaactcttgtttggtaattaagtcattcttcctttgaaaatttacacatattcatcatatt

SEQ ID NO: 5264 - DNA, 426 bp, Lilium asiatic
  Clone ID: LIB3230-038-P1-K1-A8
cttagggttaatgcagggtgggcctttgaagagtactgtaactggtgtggagatgtttaaaaagatcttggatcgtggacaggctggggacaatgttggccttcttttacgtggtttaaaacgtggggatgtagaacgagggcaagttgtttgtaagcctggcaccctgaagacctacacgagatttgaggctgagatttatgtgctcacaaaagacgaaggtggccggcatactgctttcttctcaaactacagtcctcagttctacttgaggactgcagatattactgggaaggtggagctaccagaaaatgttaagatggtgatgcccggtgacaacgtaactgcaacttttgaactgatatctcctgttccactcgaaacagggcaaagatttgctctgcgggaaggaggaaggactgttgg

SEQ ID NO: 5265 - DNA, 427 bp, Lilium asiatic
  Clone ID: LIB3230-038-P1-K1-B10
gtgctaaccgagacacatggtaggaatgcacatacctcaaccaatagtttcatggatcggttatctgatattacaggaagtacaattcggcattcaactacttctgaaagtgtcactcgtaaacctatgcaaaatcatgcatcaacagaaagcccatctgatgtgtcacttggaacgagctctgaaaaggtcatcgacacattcttgaagaatccacttttcaacaataaggaggaactggagcttaatgaattgtctggaaatttgcgctccgagaataatctgcttcaagtgttactgaggcaccaacaagccattgaggaactggtggaggagaatcagaagctgcgccgagtaatagtggaagatttgaaagtttcagctagcaagctccaaacaaacaatgggaacagaaccaagatcattt

SEQ ID NO: 5266 - DNA, 423 bp, Lilium asiatic
  Clone ID: LIB3230-038-P1-K1-B11
cggacgcgtgggcggacgcgtgggcttcgtcggcaggggcgagatcctccagtggatcaactccaccctccacctcaatctctccaaggtcgaagaggcggcgtcgggggcggtgcagtgccagctgatggacgcggtgcacccgggaattgtgccgatgcacaaggtgaattttgatgctaagagcgagtacgagatgatctgtaactacaaggttctccaggatgtgttcaacaagttgaagatctccaagcatattgaggttaacaagcttgtgaaaggaaggcctcttgacaatctggagttcatgcagtggatgaagagatactgtgattctgtcaacagtggtgtacatagcaattacaatcccttggagaggagagaatcatgtaagggagggaaggaagtaactaaaagagcacc

SEQ ID NO: 5267 - DNA, 427 bp, Lilium asiatic
  Clone ID: LIB3230-038-P1-K1-B12
ctccctactacatcacatctgctatatggggtgctggtggtggcgggctcttccccctttttcgccaaagaatctgcactaaatgtcggttttgctgccccctaaatgtggctcagaagtcgagcgacctcgacaaaggcctctcggtgtccatgtccccctccgactcgagcgaagaagtcgtgcatctcctcaccgacctcaaaatcgagttcacatctcctccctccgatggtgggtcgccagtatggaagctcgacagctctgagcccaacggccaacgatatgtgacactaaacgggtctccgcataacgaaatcaaccacgataacatgttcaaaattgagaaagcaggtgctttgggctacaaactgctatactgacccagtgtacccggcgtccatgccaatggtccttgcggtagtct

SEQ ID NO: 5268 - DNA, 117 bp, Lilium asiatic
  unsure (1)..(117): unsure at all n locations
  Clone ID: LIB3230-038-P1-K1-B2
cagggcngcaaaaaaacctgcnacaacaaagagggccacaaacgcggaagggcaggggggggccggcaacaacagagacgacgacagcgacaaaacaaacgcggacaaagacaggca

SEQ ID NO: 5269 - DNA, 142 bp, Lilium asiatic
  Clone ID: LIB3230-038-P1-K1-B3
tgagtatagaaagaaactcatgaacattacacaatttcatgtgcatattgatttcttatagttggactcggaagataaggtctcctgaagcaagaatatcttaggccaggtagccttgaaagacatcatttttgacaacccc

SEQ ID NO: 5270 - DNA, 432 bp, Lilium asiatic
  Clone ID: LIB3230-038-P1-K1-B4
ggcgtggaccttgataacaatcggttcctcattctccagggcgaagttgagcagatctcacttatgaagccgaaagcacaggggcctcatgatgaagggtttttggaataccttgaggatattataggaacaattcaatatgtggagaagattgaagaagcatctaaagagcttgaggttctgaatgaaaaacgttctggagtagtccagatggttaagctagctgagaaagaaagagacggcttggagaatgtcaagaatgaagcagaaacttatatggttagggaattagttctcttaaagtggcaagagaaggcaaccaaattggattctgaggatgctgcttcccatgttgccgagactcaagataatgtttccaacctagaacaaagtctcaaagctgaaaaggagaagattagtcaaaacgtcaaa

SEQ ID NO: 5271 - DNA, 427 bp, Lilium asiatic
  Clone ID: LIB3230-038-P1-K1-B5
aaaattgaaactgtgcgatactttcacctctataagagaggagtcgatcgagtatttattgatcatccgtggtttcttgagaaggtatgggggaaaactggtggaaaattgtatggtcctgttacgggaactgattatgatgacaaccagctgaggttcagccttttgtgtctggcagctttggaggctccgagagtcctgaatctcaataacagcgaatacttttctggaccatatggggaagatgttgttttcattgctaatgactggcacaccgggcctctttcatgctacttaaagagtatgtaccagtcagttggcatttataagagtgccaaggttgccttctgcattcacaacattgcctaccaaggcagattccccttcgctgatttctcacttctcaatctcccggacaaattcaaat

SEQ ID NO: 5272 - DNA, 428 bp, Lilium asiatic
  Clone ID: LIB3230-038-P1-K1-B6
cggacgcgtgggtttttttttttttttttttttttttttttttttttttaaagtggaaaccaaacttaaaattggaatgcctgatccaggtatatatatcctgaaggctaaaggaaacatattacttcctaacaggaacaaagatacatagaggctgttaaatgacaaatacaagaaatattctttcaagtcatcagaaccaaataccaggtggaaataagcagcgaccatagtcaaaaaatagatgtgatcattccttccataaatcagcaaactcgtctggttccaatggattggccatttcatgcatcttccttctcgtcttagcctttatcttctttgagtatttcccagcttccttcttcttctccagtgcccggatctgattgggtgatacataaaaggggttttcatacaatgtcgatcca

SEQ ID NO: 5273 - DNA, 426 bp, Lilium asiatic
  Clone ID: LIB3230-038-P1-K1-B8
aaagctgaggctaatctctctgatgctctgaatgaatttgggagaccatggaagattaatgaaggggatggtgcattctatgggccaaagattgatataggcgtcttcgatgcgttgaagaggaaatttcagtgtgcaactctgcagctggactttcagcttcctcttcgattcaagttatcatattcagcagaagacgaagctaaaactgaacgacctgtgatgatacatagggccatcttaggatctgtcgagcgcatgcttgcgatccttttggaacattataaagggaagtggcctttttggcttagtcctcgtcaagccattgtctgtcctgtatctgagaagtctcaagcatatgctttacaggtacgtgatcaaatacatcaagctggttactatgttgatgtcgatacgagtgacagg

SEQ ID NO: 5274 - DNA, 421 bp, Lilium asiatic
  Clone ID: LIB3230-038-P1-K1-B9
cagcaaacaggcttgcctctgcagttgataacacttctggtgacaagaataagaacataagtggaacaagatcagagttgaaggttctggaccatgccgatcaacctagaaaacgtcctgcaggtaaagaagccgatttcatgaaacctttgaaaagacctttttcgagaatgcatgatggttcaaatgcttcaacatgccataggagaaaagaacaactgcatgggtacacatggcataatattgtaacaccagaatatcatatgaacagtaatacaaaagcggatgtcagcatttcagcagtgactaaagagaaagaaggcttgggaactgcatctggatcatgttcggtgtcaagaccaggacctatcaaacttagtgctggagcgaagcatattctaaaaccaagtctggatatgaa

SEQ ID NO: 5275 - DNA, 170 bp, Lilium asiatic
  Clone ID: LIB3230-038-P1-K1-C10
cagcttacagactcacatctgctttttttaaatcctttagccactatattgagggctttattataacatgatcaaattcgtacgttcagacacatctactattaatctataaaacactcttcaattaaagaaacttcattcatgaatcttataaaaatactttctctaca

SEQ ID NO: 5276 - DNA, 325 bp, Lilium asiatic
  Clone ID: LIB3230-038-P1-K1-C11
gtgctaactgagacacatggtaggaatgcacataccttaaccaatagctggagtggatcgattatatgatattacaggatgtacaatttggcattcaactacttttgaatgtatcactcgtaaacctatgcaaaatcatgcatcaacagaaagcccatatgatgtgtcactaggaacgagctcttaaaaggtcatacgacacattcttgataaatacacttttcaacagtacggatgaacttgatcttaactaattgtctggaaattagcactcttagaataatctgtttcaagtatcactgaggcaccaacaagctattgagga

SEQ ID NO: 5277 - DNA, 388 bp, Lilium asiatic
  Clone ID: LIB3230-038-P1-K1-C12
agtctaacagcactaaagcaattaagaatataactaactacatactgaattcctggatctattggtacctccaggtccaattcaggtcatataagataacacacactacatgcaaattccaatttcttttcaaaatccctaggaaaattgaagagaatcacacctagctattaaagacaaatcctgggtaacacgccaaaactagtcactcacacccaaccacgaaaaacccactcagacaacactcaaataaaccatgctaaaatcacttgacaatgacatccacacaaagatatcactattgttgcttgcactcggccggtcgatccacctgctgaccatcagcgccgctcttcttctttctggttgtcttcttggacttgctacc

SEQ ID NO: 5278 - DNA, 248 bp, Lilium asiatic
  Clone ID: LIB3230-038-P1-K1-C2
ctctcctccaagtgaacctactataacatagatgtctactagctcggatggccaggggggagctgctatcaactgttatggtgatatctacatatttaacttggagattgataggcaccattggttcatactcagattgaatggagcttctgttactgcttgtggtttcccccctgccaacagttacgtgcttgttatcacaacatctacaaatcaagcctatgtatttcatgttgaaccaaaacagt

SEQ ID NO: 5279 - DNA, 394 bp, Lilium asiatic
  Clone ID: LIB3230-038-P1-K1-C3
agcagaggttcagggaattcgcctccaaaaccctagaagaccctgcgaaggttgaccccgacaacctctactgggagagcaccttctatctccgtcacctccccaccttcaacatggaggaggtccccgatctcaccgttgagtaccgtgagactatgggggtgtttcaaaaggctctgagagctagcggaccagcttttctacctgctgtgtgagaacctggggttggagaaagggtatttgaagaaggcctttagtgggacgaacgggctgaccttcggtaccaaggttagcaactattcgccctcaccgaagccggatctgatcaagggccttcgtgcacacaccgatgctggcggcctcatccttctgtctcaggacgacaaggtgagcg

SEQ ID NO: 5280 - DNA, 163 bp, Lilium asiatic
  Clone ID: LIB3230-038-P1-K1-C4
ggggcctacatggagaacagtcgctactttgttgtctacgacgtagtttagccgggctgaattttgtatcacctggcacagccgcctcagcattaataaggtgtgcaatgcctggaacaaatgattggtacacctaatcaatgggggatgatactgagaatta

SEQ ID NO: 5281 - DNA, 380 bp, Lilium asiatic
  Clone ID: LIB3230-038-P1-K1-C5
cggatcaataagaagaagaggagcttgacggagctgatcgaagagatggataaaggcaagaagaaatcagaacctcgaaagcctagtgagcggtcagtcgcggcctccaaatgcaagaagaagggggacggacggttggcggtggtggatgaagtgactggattcggatcgatcgggcgggagcttaagaagagcaagtatctgtcacctccctacacattttcaagcggattttgcatgcttgtctcacataaggaatccgatccggaggctgtgaagaatgtaagccaagcatcggcagcacctaagaacatcgactccaaatcaccaaagaaggtgctgtagaatgttagccaagcatcttcggcacctaagatcat

SEQ ID NO: 5282 - DNA, 432 bp, Lilium asiatic
  Clone ID: LIB3230-038-P1-K1-C6
gggtctcactccttatgagttcgtcgaaagtatgaaaaagaagggaattcgtgtaccagggattggacacaggatcaagagccgagacaaccgtgacaagagagtgcagttgctgcaacaatatgctcacacacatttcccagcggtaaaatacatggaatatgctgtccaagttgagacctatactctcacaaaggcaaacaacctggttctaaatgttgatggtgcaattgggtctcttttcttggatctccttgcgggcagtggaatgttcaacaagcaagagattgatgagattatcgagatcggttacctgaatggactcttcgtccttgcacgctccatcggtctcatcggacatactttcgatcagaagaggttgaaacagccgctctaccgccacccatgggaagatgtcctgtacactaagtg

SEQ ID NO: 5283 - DNA, 429 bp, Lilium asiatic
  Clone ID: LIB3230-038-P1-K1-C8
ggatccacaacctagggggaggggaagggagtttgagaaaccctaaccctagattggtccaagctctgataccatgataaagaagaagagagctttgagggagaataagtgttcgtgtggttgagttcctcattgcccatgaaggggtatttataggattacaagtgataagtgcacacacacctctactatttacactccacaaatatctccttgctatgctaaagctaccctcacatatgctactgctactcctacacctaaagttgtacatttacatttaacacttcaaaatagtaaaatacaacaatacattaaatatcataaatgaagaattaacataaagaataaataataccatgtctggtggggacgaggaatctatcccaaatttaggtgggagggagaatccttgccccatttaaaatg

SEQ ID NO: 5284 - DNA, 112 bp, Lilium asiatic
  Clone ID: LIB3230-038-P1-K1-C9
ctatcctcacgatttaacctcctattatataaatgtcttctagataagatggggagggtatattatggcatgatccgtattgaagatttttgcacattctactcaaacaata

SEQ ID NO: 5285 - DNA, 168 bp, Lilium asiatic
  Clone ID: LIB3230-038-P1-K1-D10
ctccccaaaaccctcgctggcggcgggattccagatcgacggcgagagagatttgagcgagagtgaggggaaagagtgagatagagctcgcgagagagtgtgtgaggcgcgtcgaggagagcgagtttgattattgttgtgtattaaccgttttatggcctgcatgct

SEQ ID NO: 5286 - DNA, 249 bp, Lilium asiatic
  Clone ID: LIB3230-038-P1-K1-D11
ctcccaataaccctgcctggcctttgtattccagatcgacagcctaagaggggggagcgagtgtgaggtgtaactgtccgaacaacctcgcctgagagtctattactctctgccagtctactcgagtttgtgactcgatgtgcattaaccgaatcatgctccgcatgcttgtgtgacttgttataccatcggtaagtggatcctgaaggattgagacactatattaccatgtcttaggcactcttctag

SEQ ID NO: 5287 - DNA, 432 bp, Lilium asiatic
  Clone ID: LIB3230-038-P1-K1-D3
aatctcctccacacacccaatccagtatccaagccgctgtcttaccggagctcccgcatctcattcccaaacacaaggaggagctctctcacaatctcggccgtagccgcggaggctcctccgagggcccaggatgccgacgtcgcccggaggctctacgtcggtaacatcccgaggaatgttaagaatgaagagctcgccggcatcttcgccgagcacggttcagttgagaaggcagaggttatgtatgacaaatactccggcaggagccgacggtttgcttttgtcacaatgagcacagtagaagatgccaccgttgctattgagaagctgaatgacacggaaattggagggtcgaaagatcaaagttaacgtgacagaaaaaccattgtcagttgagttctctgtcctccaagctgaggaatctaaatt

SEQ ID NO: 5288 - DNA, 432 bp, Lilium asiatic
  Clone ID: LIB3230-038-P1-K1-D4
gatacattttgctccccagttctattctgcctttggcgtgtccgtagatcatggcatagaaatgttatcaagaaatgcagcaacattgaagtccaaagggaactattcaaacgccttgggaaaataatatacagcatttgggatagaacaaattttatggatgtattggaagagtttctccaagattttgtcgatcaaactgccttcattcagtatttcaaggcttgttgggtgccgaaacttgaaatgtggattgccactatcaggtgtcttccgttagccagccaggagtcgtgtggtgccattgaaggttaccatacaaagctcaagctcaaagtgtatgacgattcgcgtctcggtgcactccagcgcgtggattggctggtccacaagctcacgactgagctacattccagctactggctcgatctt

SEQ ID NO: 5289 - DNA, 429 bp, Lilium asiatic
  Clone ID: LIB3230-038-P1-K1-D5
aattgtggcagtacatttgtaaaattgtagactcctatatccttgggtgacttaagttcaccatgagacaaaagtacatgtatctgtacctaccaggattcttcagatactcaatcctcgtattttgtttttatgtttgtgttttgatttctttaggtttcatgtagatctaatatgtcatgaatgaatgtgtattgtgttagtattttgactaggacttgtatttaaaatttctaattttggttagagacttgtactgtttcctaactctggttttacaattttttgttgtaccatctctatacttgtatcatgtacacttattttatgagacatgtacgatgtttttccaccgttaaaccaacccatgttttgttggtatctttgtctggtttgtttagacaattttttaaccataaacatatttta

SEQ ID NO: 5290 - DNA, 225 bp, Lilium asiatic
  Clone ID: LIB3230-038-P1-K1-D7
gaatctacagcctagggggaggggaagtgtttttgagaaaccctaacccgggaggggtccaagctctgataccatgataaagaagaagagagctttgtgggagaataagtgttcgtgtggatgagttcctcattgcccatgaaggggtatttatagtattacaagttataagatcacacatacctttactattttacactcaatatatatctgcttgatttgtta

SEQ ID NO: 5291 - DNA, 426 bp, Lilium asiatic; identical to SEQ ID NO: 5273
  Clone ID: LIB3230-038-P1-K1-D8

SEQ ID NO: 5292 - DNA, 424 bp, Lilium asiatic
  Clone ID: LIB3230-038-P1-K1-D9
acgaatggctctgatgttgccaagcactgtgtgcctgcagttcctacaaaaaggatatcaataaccttcagaaagatggatgaaagaaagcagcctattggttctgatcccgagccggatctgcagaacatccaaccactgctgtatgagaccgaagaagctgcgcccagtatgaatgggtccattaaagggaaagcatcgacgggaagacagcctatggttaagcccgaacatgattttctcgaaggccattcaagcagtgcaggatcacatactgagcaccgtatgaatggggtccattaaagggaaagcatcggggggaaggcagcctgaacatgattttcttcaaggccaatcatttgatttggtgactgcaaagcacactccatatcaccgggatgaagactgggaaacattgagcttc

SEQ ID NO: 5293 - DNA, 428 bp, Lilium asiatic
  Clone ID: LIB3230-038-P1-K1-E11
cggacgcgtgggcggacgcgtgggtgggcaggaagatttcacccgtcacaatgacattctgaaatgggccaaggccaatagtcatggatcactgcaactaatttgtgagtattacctattacaattacccccaagaggttcagtgcttacatttcagcctttggagcacctacatcccttggaatttcatagaccgggtgaaacagttctccatattgctggttccaccattgatgttagatcttgcagtacaagcttagaagtggctgaggcgcatactgcacttttagcagaggaggaagctactgctttatctgtttgggcagttgcatgcatatgtggcaacctgaggcttgagaatgtgatgatgatgtttgctggggctcttctggagaaacagattgttgttgtctgctcaaatttgggac

SEQ ID NO: 5294 - DNA, 379 bp, Lilium asiatic
  Clone ID: LIB3230-038-P1-K1-E12
ccgacccgtgggtatggacggaaagtgtgacccttatggcacgaggatcgcccacaggtagggaagagaggtatggtgccattaccggcgccgatctccgtggcgcaaggcgggcactgatgtgctatgacatacaccatggaggaacattactttatgtacagtattggctatctgaactgacacaccatgcatattcaagcatggacatcacggtgattggtaccccggatgacttgcatcatattaagtcaggtccaaacacatatgctcaagttgtagctgacacagaggctgtatcatttttggagacctagcaattggactaactcaatgcacatgggtctgagcgtactactatgcactgatatgatagtca

SEQ ID NO: 5295 - DNA, 256 bp, Lilium asiatic
  Clone ID: LIB3230-038-P1-K1-E2
tggtctcactctttatgagttcttctaaagtattaaaaagaagggaattcaagtggagggattgtacacaggatcaatagccgaaacaaccttaacaagacagtgcatttgctgaacaatattctcacacacattttccagcggtaaaatacatggaatatgctgcccaagttgagacctatacttttacaaaggcattacaacctgcctctaaaagatgatggtgctatttggtctattttcttgtgttttcttt

SEQ ID NO: 5296 - DNA, 419 bp, Lilium asiatic
  Clone ID: LIB3230-038-P1-K1-E3
cagagaccgaaagagggcgagatggaggactcgtttcaggatggaaaggaggcagtcattcaagcgtggtacatggacgatagtgaagaagaccagagacttcctcatcaccgtgaacccaaggaatatctttctttggagcaacttaaagatctaggagtcgtcagctggcgcctgcaaaatgtcgatgattatgacaatgatgaagatctgaagaagatacgtgaagccaggggctattcttacgtggacataattgaagtgtgcccagagaagctgccaaactatgaggccaagatcaagagtttctttgaggagcatctgcacactgatgaagagattcgttactgccttgatgggactggttactttgatgttagggaccgtaatgaccagtggattcgcgtggctgtgaagaa

SEQ ID NO: 5297 - DNA, 407 bp, Lilium asiatic
  Clone ID: LIB3230-038-P1-K1-E4
gggtctcactccttatgagttcgtcttttgtatgaaaaagaagggaattcgtgtaccagggattggacacaggatcaagagccgagacaaccgtgacaagagagtgcagttgctgcaacaatatgctcacacacatttcccagcggtaaaatacatggaatatgctgtccaagttgagacctatactctcacaaaggcaaacaacctggttctaaatgttgatggtgcaattgggtctcttttcttggatctccttgcgggcagtggaatgttcaacaagcaagagattgatgagattatcgagatcgcgtacctgaatggactcttcgtccttgcacgctccatcggtctcatcggacatactttcgatcagaagaggttgaaacagccgttctaccgccacccat

SEQ ID NO: 5298 - DNA, 323 bp, Lilium asiatic
  Clone ID: LIB3230-038-P1-K1-E5
gggtctcactccttatgagttcgtcgaaagtatgaaaaagaagggaattcgtgtaccagggattggacacaggatcaagagccgagacaaccgtgacaagagagtgcagttgctgcaacaatatgctcacacacatttcccagcggtaaaatacatggaatatgctgtccaagttgagacctatactctcacaaaggcaaacaacctggttctaaatgttgatggtgcaattgggtctcttttcttggatctccttgcgggcagtggaatgtttaacaagcaagagattgatgagattatcgagatcgggtacctgaatggac

SEQ ID NO: 5299 - DNA, 432 bp, Lilium asiatic
  Clone ID: LIB3230-038-P1-K1-E6
gacactttggcgctaaatatactgacatgcatgctgattacaccgggaaaggatttgatcagttactggatgtcattgataagataaaaaacaatccagatgatcgccgcatcattctctcagcttggaatccttcagatctgaaactaatggctcttcctccttgtcacatgtttgcacaattctacgtggagaacggagagttgtcatgtcaaatgtaccagcgctccgcagacatgggtcttggagtgccctttaacatcgcatcttactcccttttgacgtgcatgattgctcaagtctgtggtcttcagccaggagattttgtccatgttttaggagacgcacatgtttactctaatcacgttaagcccttgctcgagcaacttcaaaagcagcctaaaccttttccggttctgaatatcaaccctg

SEQ ID NO: 5300 - DNA, 423 bp, Lilium asiatic
  Clone ID: LIB3230-038-P1-K1-E7
ctagttagttaagttttatataagagtaactttacttttctatgacttccaattcactggtgttatgccaaataattttgtgcttaaaaaattctccttcattaatttaatgaatttataggtatcttttagtatatgaatttgagttattacaatataatatcttttgggggaaattaaactccacgccttcgtattgacctcaatttgtgttatgccctccatgaaataaaataaataaaggtcatatatagtttagtgacattcatatattaggatggtcaaatttattaataatattgatttagttttaagttttttggtggaaatttctcatataaattccataaactaaataatatttttaagtatcaccgagtaacttcaaaatcaagacaagtgtataacacatataacgaacat

SEQ ID NO: 5301 - DNA, 421 bp, Lilium asiatic
  Clone ID: LIB3230-038-P1-K1-E8
attcacttcaagagatgagtgtggggccccgtgaggtgaaaatctcatgtacgggtctgtagagtgacagtaagggtgacttatctgtcaacttttccactatcacccccaaaaaaccaaactctgccttacgcaaagttgccagagtacgattaacctctggatttgaaatcactgcttatatacctggtattggccataatttacaagaacattctgtagtattagtaagaggaggaagggttaaggatttacccggtgtgagatatcacattgttcgaggaaccctagatgctgtcggagtaaaggatcgtcaacaagggcgttctagtgcgttgtagattcttatccaagacttgtttatttgatgatgccatgtgaatcgctagaaacatgtgaagtgtatggctaacccaataac

SEQ ID NO: 5302 - DNA, 441 bp, Lilium asiatic
  Clone ID: LIB3230-038-P1-K1-E9
ccataactggggtggcttataaggacgatccaactatcttcgcatgggagcttatgaatgagcccagatgtccatctgatttgtcaggaaacagcattcagtcatggatcacggagatggcttctttcgtgaaatccatagacggaaaccatttactagaagctggtttagaaggattttacgggccgtcaactactgggttcaatccaggcttccaagtgggaaccgatttcattacaaacaacaggattcctggcatcgactttgctactcttcattcatatccagaccaatggttaccctattcaaatgatcagtcgcagcttgctttcctgaataattggcttgacatccatatcagagacgcacgccgcctcctcggtaaaccacttttgctgaccgaatttggaaaatcgtggaaagacagtggattcagcaaca

SEQ ID NO: 5303 - DNA, 197 bp, Lilium asiatic
  Clone ID: LIB3230-038-P1-K1-F10
cggacgcgtgggctttattcaacatttgtgatcgaggctcgtcatggttggaataaacaaactatatggcttttcttcagggatatgttaaaggaaattcttctttccattttacttgggccgccaatagttgctgcaatctattgtcttagttcagtatggaggtccttacctgatgatctttttttaactgtctg

SEQ ID NO: 5304 - DNA, 382 bp, Lilium asiatic
  Clone ID: LIB3230-038-P1-K1-F12
agtaccggaatcgcccgggccggcgccagacccacccgtgccgcgtgggtacaacagctgctttttttatagttgatggctccgagtttgggcgggggtatctcggcgagggcccgagaatggttagggatgtattttgtcttgcgaaagagaatgccccggtaattatcttcattgatgaggttgatgccatacctactgcacgttttgatgcacaaaccggtgcttgcagaaaagtttaacgtatcctgacggaactattgaatcagatggatggattcgatcagacagtacatgtcaaagtaataatggcgaccaatccggcggacactttcgaccccgctctttttttgtctggaaggcttgctaggaaaattgtatt

SEQ ID NO: 5305 - DNA, 431 bp, Lilium asiatic
  Clone ID: LIB3230-038-P1-K1-F3
gggtctcactccttatgagttcgtcgaaagtatgaaaaagaagggaattcgtgtaccagggattggacacaggatcaagagccgagacaaccgtgacaagagagtgcagttgctgcaacaatatgctcacacacatttcccagcggtaaaatacatggaatatgctgtccaagttgagacctatactctcacaaaggcaaacaacctggttctaaatgttgatggtgcaattgggtctcttttcttggatctccttgcgggcagtggaatgttcaacaagcaagagattgatgagattatcgagatcggttacctgaatggactcttcgtccttgcacgctccatcggtctcatcggacatacttttgatcagaagaggttgaaacagccgctctaccgccacccatgggaagatgtcctgtacactaagt

SEQ ID NO: 5306 - DNA, 233 bp, Lilium asiatic
  unsure (1)..(233): unsure at all n locations
  Clone ID: LIB3230-038-P1-K1-F4
gnatccaactcctaatgagttgggacaaaggatgtttaagaccgaacctcagggggcggggatttttcacaggatcaagagccacaacaaccctgacaagagagtgcagttgctgcatcaatatgctcacacacatttatcagcggtgatatacatggaatatgctgttcaagttgagacactattctttcacaaagcgctacaccctggttctaaaggttggtggtgcattc

SEQ ID NO: 5307 - DNA, 430 bp, Lilium asiatic
  Clone ID: LIB3230-038-P1-K1-F5
cccacgcgtccggtcgaggctcactggggagtcgaggttcaaccaacattctggagaatcaagactgactgccgagtcaaggtataaccaacattcgggggagtcaagacttaaccagcattcgggggagtcgaggatcaaccagcattccggtgagtctagggcttcatcctcccgaactgcagctgccagaagctcgccccgtgatgatacggttcgaggttttgagttcctgagaatcaattctgataagaggaggtgagagaacatcttctcaaaagccttgggagggcgggttcgatggtcgtctgatttatatgtcgatatcggtttctactcaactcaatgtgttaagatcgagaagtacaagaagaaagaaaagtttgttacatatttttcgtaaatctaaatatgtagtaccccttgtatg

SEQ ID NO: 5308 - DNA, 424 bp, Lilium asiatic
  unsure (1)..(424): unsure at all n locations
  Clone ID: LIB3230-038-P1-K1-F7
cgatgagcttcgcaggtcacctggaactccagtttttactgcaccagaatgttgtttgggcctgacataccacggtagagctgccgatacctgggctgtgggagttaccttgtattacatggtttcgggtcaatatccatttctcggagagacgctgcaggatacctatgataagattgtcaacaacccgctgataattcctgataacgtccacacagagctgaaggacctactggagcagctgctttgcaaagatcctaggcaacgaatcaccttatctggtgtgacgaagcacgcttgggtggttgctgaggatgggccgatccccgaattcttgtgtcggtgtcaacgaaacagctccaaagggttgtaaatattgtgcgacccgacaacactgggttntgttttgtaaatcatcgttcag

SEQ ID NO: 5309 - DNA, 427 bp, Lilium asiatic
  Clone ID: LIB3230-038-P1-K1-F8
gagcaaaaacctcttcttgatccaattcgagaaggggaaaagattcttcattacctggaaactttgaggccacatcagttactcgaacaaatgatttgcacatccttcagagcctcagcggacactttgagccagaccacctatggtgatctgaagcttttgaaaactaaagtctcccagctttattctacacttgcttctactttgaagccactgcaagtaaatgaatctactgataaggctgagttgatcggtgatttaaaacagttatgtcgaacttttgagcacattgagaaactaattacagttgctgcttcaatccatcgtaagctgtggcatgctccacgtctttcaaaagtaattttcgatgattatttcaattactatcttccaaaaatgggaaccagtttgacaagcatttgctatg

SEQ ID NO: 5310 - DNA, 413 bp, Lilium asiatic
  Clone ID: LIB3230-038-P1-K1-F9
gccgcgtgagtgattagatctgtgatgttgtatgtgatgttgcgtcaagattggaagtgatcgtcgttctccttcgagatttctctcaagatcatggagatgaatggaatctctgaagatctgtggagatttgcgttttctgtgtcatcggaacaatttatatgtcactatctcaagatctgtggcgaacagctgagattcgcgtttttctctctagatctttggctatctgaaggtattggcttttttttcccctcaaaatctgaagcttactcaccgatgtctttaatgtaagatatgtaagggctctatgatctttgccgggcctttgtcatgtcgggtgagctcgcatggcaggtcatctgatgctcaataaaaaattgattgttgtgttgtgagggggagatcgcatg

SEQ ID NO: 5311 - DNA, 448 bp, Lilium asiatic
  unsure (1)..(448): unsure at all n locations
  Clone ID: LIB3230-038-P1-K1-G1
ccgccgccgtcggctcctccactgatctgaagccatgagcaagcttcagagtgatgtcttgagggaggcgattgcccaggttgtggccgagtccaaggttaaagacaccgataagaggaagcggaattttactgaaaccgttgagcttcagatcggtctgaagaactacgacccccagaaagacaagcgtttcagtggctctgtgaagttgccgcatattccccgcccgaagatgaaggtctgcatgctcggagatgctcagcatgttgaggaggctgagaagattgggctggactacatggatgttgaagggctgaagaagatgaataagaacaagaagctggtcaagaaacttgcgaagaagtatcacgctttccttgcatctgaggccatcatcaagcagattccacgtcttctaggcccggngcttaacaaggcagggaagttc

SEQ ID NO: 5312 - DNA, 425 bp, Lilium asiatic
  Clone ID: LIB3230-038-P1-K1-G10
caaggatagtactacatgattggtatgagggtaaaattccatattataccatgccccctgttaaggaacaaggagagaattcgatgcccgtgattgtttcagagcttgcaaaagaatttgatgtggatgaagtttacaataccgaatcttcatttattggtagcctcaagtctgttgatgattttcagcatcttgaagtaccttctagtgtgcctccaatttttgatgagcaaatgatggataaggatgttgtggtgcttaaagaaataacagaggaaaaagtagagctgatggcatgtgatgatggaaaggaaccaaaggatcctttagagaaggagcccaacacaaccaggaaacagaatgagaagctctatgcagtagagggcattctagatcctcggctccgtaaagcagaaaagaagcgc

SEQ ID NO: 5313 - DNA, 305 bp, Lilium asiatic
  Clone ID: LIB3230-038-P1-K1-G2
tagagatggtgaaagaggtgagcgccgaggctgagcagccaccctccaaggactgcgacggaccctccaccagctccgctcttcgacttcggcgagctccgcctctggtcactctaccgtgccctcatcgccgagttcatcgccaccctactcttcctctacatcaccgtcgccaccgtcatcggctacatgaatcagtccgccaccgacaaatgcgacggtgtcggcattctcggcatcgcatgggcttttggaggcatgatatttcgtgcttgactactgtacagccggaatttctgggggtc

SEQ ID NO: 5314 - DNA, 434 bp, Lilium asiatic
  Clone ID: LIB3230-038-P1-K1-G4
cggacgcgtgggtacaacagctgcttttataagagttgttggctccgagtttgtgcagaagtatctcggcgagggcccgagaatggttagggatgtatttcgtcttgcgaaagagaatgccccggtaattatcttcattgatgaggttgatgccatagctactgcacgttttgatgcacaaactggtgctgacagagaagttcaacgtatcctgatggaactattgaatcagatggatggattcgatcagacagtaaatgtcaaagtaataatggcgaccaatcgggcggacactttggaccccgctcttcttcgtccgggaaggcttgataggaaaattgaattccccttgcctgatagacggcagaagaggctcgtattccaggtctgtactgccaaaatgaatctaagtgacgaagttgatctggaagact

SEQ ID NO: 5315 - DNA, 303 bp, Lilium asiatic
  Clone ID: LIB3230-038-P1-K1-G5
ccggaacggaagggtcgactcgagcgacgcgtacctaaggattgtactacatgattgttatgttggtaaaattctatattatactatgcccgctgttaaggaacatggagagaatgcaatgccctttattgtttcatagcttgcaaaagaatttgatgtgtatgaagtttacaatacgtaatttatatttattggttgccttaagtttgtcaatgattttcagtaacacgaaatacctgttagcgtgccttgcatattttgatgagcacatgttttataacgatcttgaggtgtttaaagaat

SEQ ID NO: 5316 - DNA, 297 bp, Lilium asiatic
  Clone ID: LIB3230-038-P1-K1-G6
tcggaatccacaacctatggggagggggagggggtttgagtaaccctaaccctgaatgggggcgaactctgatacccagtttaagaggaagagagctttgtgggagaataagagtgtcgtgtgagaaagaatctaattgtccattaaggggtatttataggatgacaagtgataagtgcacacacacctttacgattaacactgcacataaaactctatgctttgttaaaacaactacggcatattttggagttagtgatacacctaaaggggttcatttacaattaactcttggga

SEQ ID NO: 5317 - DNA, 267 bp, Lilium asiatic
  Clone ID: LIB3230-038-P1-K1-G7
taatccactgcttacgctgctgcgtatttaactgcataaaccacaccacgggaggggtgcatgtttagagaccctgataaaacacaactgaacttagccgctgatttagttgtcgtggtgttacctatctcactgcctatctatgggaatttatatgatgaccagtcagaagttcccatacaccaatagcatgcacactccaaaaataaatacatgctttgctaaaattaccattacctatgctgccattaatgatcctccgattgt

SEQ ID NO: 5318 - DNA, 400 bp, Lilium asiatic
  Clone ID: LIB3230-038-P1-K1-G9
cggacgcgtgggcggacgcgtgggtgggcaggaagatttcacccgtcacaatgacattctgaaatgggccaaggccaatagtcatggatcactgcaactaatttgtgagtattacctattacaattacccccaagagggtcagtgcttacatttcagcctttggagcacctacatcccttggaatttcatagaccgggtgaaacagttctccatattgctggttccaccattgatgttagatcttgcagtacaagcttagaagtggctgaggcgcatactgcacttttagcagaggaggaagctactgctttatctgtttgggcagttgcatgcatatgtggcaacctgaggcttgagaatgtgatgatgatgtttgctggggctcttctggagaaacag

SEQ ID NO: 5319 - DNA, 73 bp, Lilium asiatic
  Clone ID: LIB3230-038-P1-K1-H10
aaaacaggtagagagaacaatttttttttgatagaacttaagaaaaaaaggaggggtaataaatttaaaaaga

SEQ ID NO: 5320 - DNA, 436 bp, Lilium asiatic
  Clone ID: LIB3230-038-P1-K1-H12
ggttcgcggagagcgtcgggtggcggatgcaaaagcaggatgaggcggcagtcgaacagttctgcgccgaggtgggtgtgcgccggcaggtgctcaaggtttggatgcataataacaagcatactatgcgaaagcgacagcaagaatatcatgatcatccacaacaacaacaagaccagcaacagcaaccactccaaattcaggaacatcaccagcagcaacagcaccgtcctcagcttcagccgcagcaacaacaacacactcagccgcagcagcagcaacagcaccgtcctcaactgcagccgcagcaacagcaacatactcagctgcagccgcagcaacagcatactcagccgcagcaacagcaccgttctcagctgcagccgcagcaacatactcagccgcagcaacatactcagccgcagcagcagcaaca

SEQ ID NO: 5321 - DNA, 434 bp, Lilium asiatic
  Clone ID: LIB3230-038-P1-K1-H6
ccacatctctctctctctctctctctgaaagatgaagattctctccatcaccttggctctgcttctgctcctcctaacttcctcctacctcgaatcagccatggctggtccgcctgtccccgcagggttctgtgataataagtgcggcgttcggtgctccaaggccgggaagcagtcacgttgtctcaggtactgtatgatgtgctgcaatgattgtggctgcgtgccgtcggggacttacgggaacaaggacgagtgcccgtgctacagggacattgtctggggtcccctcaggaagccaaagtgcccatgattatgcgagctatggttgttctatgtagtttagtttgagttgcttggctcttaataatgaggggacaatagagtgcttgctctcatatcctctctgtttgttttgtatcagatcagctggt

SEQ ID NO: 5322 - DNA, 426 bp, Lilium asiatic
  Clone ID: LIB3230-038-P1-K1-H7
cccacgcgtccgggcggtgctacagagttgaccgtttccgcaacactaaaacagaagagttcttctattgaaggcattgagaagtggccctatgaagccgctgccttagcttttgaggccataccaagaactctggctcaaaattgtggcgtgaatgtgatccgaacaatgactgcactacaaggaaagcatgcaaatggtgaaaatgcatactggaattgatggcaacactggtgctatcgctgacatgaaagaacggaagatttgggattcatacagtgttaaggcacagactttcaagacggccattgaggctgcttgtatgctgttgaggattgatgacattgtgagtgggataaagaagaagcaggctcctggatctggcccgactccgtcaaaaccgaagatagaggatgagggtgatgc

SEQ ID NO: 5323 - DNA, 325 bp, Lilium asiatic
  Clone ID: LIB3230-038-P1-K1-H8
cggacgcgtgggtgaggagaaaactactggaggtttatttcttccaacaagtgcccaatcaaaacctcaaggtggtgaggtcgttgctgtcggagagggaaggtccattggcaacaaagaagtgcagatcagtgttcaggctggagcccaggtggtttactccaagtatgcacgaacagaattgtaattcaatggtcctaaccatctattgttaaaggaagatgacattgtgtgctttctatataccgattatttctaggatctcaagcctcttaatgattgggtttttataaagatatcctaagctgatgagaatacttttgtt

SEQ ID NO: 5324 - DNA, 250 bp, Lilium asiatic
  Clone ID: LIB3230-039-P1-K1-A12
ctcggtcaccccctatgcagcctcaggtggcgccgccggcgtatacaagggcgtggactttgccaactacttgtgcacctacgccttcctgtaccaccagaaagagttgctcttcgaccgcgtgcgcatggatgcctacttaaacgccatcttcaaaatcgtcaccacttcctcaacaaggttgtataggatgttggttcttggtagtggaatactgttcatatggttgccttaagtttggtcgatgaaa

SEQ ID NO: 5325 - DNA, 343 bp, Lilium asiatic
  Clone ID: LIB3230-039-P1-K1-A2
attgtcagcgatgctgctgggaagcagttatctcatcggtccgcattggaactgatcaagcaatggtttttggaaaaagtgggtgaggatgcgtggggggatgatgaggcattcttcgcttggaaagatgacccaacgaactttgagacgtatctcaaagaattacgagttcagaaggttttatcgcaactttcggatcttggagaatcagcatctgatttacaagctttgcctcagggcctagcagctcttctctcgaagatggaaccttcgagccgaggacagttgtttgaagagctcagacaagtcctttgctaagtgcgccgttacatctatacttttt

SEQ ID NO: 5326 - DNA, 420 bp, Lilium asiatic
  unsure (1)..(420): unsure at all n locations
  Clone ID: LIB3230-039-P1-K1-A5
cggttcttaagtgcatctactaacganttgaatgaatctcaagtactgaaagaagtcaatgatggaaatttaccgtctgaagatcagcctgacgtggctgctgaaccagatccagatgatggtgtgctgaaagatggtcaggtgaagatgcttgatgaacctgatcctgatgatgaactagctactgtgagccgtatgcatatcgatgtaacgacagagagaggtgaaccctttgaatcttcaatgcatactggcaaggacgagccagatcctgatgactccagagatgaacctgatccagatgattctgaatttggcgaagcagtgaaaacttttgagccagatacagatgatctgatgtcgaagaatgttgatttgaattgtcagaatacatttgaacctgaccctgttgattttgga

SEQ ID NO: 5327 - DNA, 416 bp, Lilium asiatic
  Clone ID: LIB3230-039-P1-K1-A6
cagaaagtcaatcctaccctgagcgttatcaggagatggtttcaagggatcccccaccacaagctccttcaagggactaccgctctgttagtggtccttactattctgaacatgctggagctaatgctgcctatcaagcaccacgcggctttgagtatgatgcttccggccgctcatatgaagctccaagtcgtgcgtatcctgaaagtgcccagagtgttccaggtggcaggttgaatgtgccaagtgtgcctgtttcctccctttactcctttgcaggtgcagctcctgcatatagttgatgatttttcccaatcccaagcgcaattgttggtaaaactttctcgttcaaatgtttaggtggttatatgaaacctgcttgagttggattaatgaaacttgtttgacaaaatgcc

SEQ ID NO: 5328 - DNA, 434 bp, Lilium asiatic
  Clone ID: LIB3230-039-P1-K1-A7
cttgcttcttatttgttcaacactgaggaagcgcttgtcagaattgacatgagcgagtacatggaaaagcatgcagtttcgagattgataggtgcgccgccgggttatgttggatatgaagagggcgggcaattgacagaaacagttcggaggagaccatatgctgtgatattatttgatgagatagagaaagctcattctgatgtattcaacgttttccttcagatacttgatgatggtcgagtgactgattcccaaggtcgcaccgtgagtttcactaatactgtcctcatcatgacatcgaatgtgggttcccaatacatactaaatgcggatgatgagaatatgaattatgaaaccatgaagcagagggtgatggatgctgcaagatccatattctcgcctgaatttatgaatcgtgtggatgaaaattg

SEQ ID NO: 5329 - DNA, 427 bp, Lilium asiatic
  Clone ID: LIB3230-039-P1-K1-A8
cggcacgcgtgggttttttttaaacccaaaaaaccaaaacttggattccttccggcttaataaccggaggcccggcgctaagattcaaaaaatatacaaaaagggcaccacctttttttttcctctaataaaagaaaaaatgggcgccgagggatatgtacttctttaaccacaagggaatggtcttaagacacgcctgcgcctgtggtgacttgaaaaggaaagttaggggggggagaaaaacactgcattcttttactctatgacaggggcggggacaattactttactaagctcctgtgagtaggggaggggacgagcctttattcagacgtgctccgcgaccactgacaaggtcgggggcatgcatattagtggtgggcttctgttttgtacaagaggggttgcgactggatgaactaggctg

SEQ ID NO: 5330 - DNA, 130 bp, Lilium asiatic
  Clone ID: LIB3230-039-P1-K1-B1
tcgaaacaaagaggacgttctgatgaaggcagaaaaggatctttctgttgtgaccgatcagcatatgtcaagattagtaaaagaactgcaagggactgatttttggaagcttaaacgtgcatattcattt

SEQ ID NO: 5331 - DNA, 409 bp, Lilium asiatic
  Clone ID: LIB3230-039-P1-K1-B10
cggacgcgtgggcggacgcgtgggttttaataataaatttgtcaatacaaatcaagatcttggattaacaggttcaccttaaccttatttaccctattctcctcgataaatgtcatattgaacaactctaacatcattcacccttcttcattgacgatctttttgttagctaaggaaaatatttagctttaaattattatttcccttttatcttcccattccatcaacaatcttttactcatcagtcttcttctcctcctctctttatctctgataattatggtgctccaacctgtactctgataattggtatctccaaacacatccaaataatatctgtcatatcttccataaacctatctaccataagggttaccaccagcaattgagagttgaaagatgcccataa

SEQ ID NO: 5332 - DNA, 413 bp, Lilium asiatic
  Clone ID: LIB3230-039-P1-K1-B5
ctgatagtttgatctttgttcgtgaggctattagagctgcggcaaggaagcatggattgctagccacctttgttccaaaatactgcttagatgatattggctctggatctcatgtacatctaagtttgtgggagaatggagttaatgtttttatgggatctgaggtatcaaattcacaatatggaatgtcaaaagttggagaatgtttcatggcaggagttctgaatcatcttccgtctatcttagcattcactgctccacttccaaacagttatgacaggatccaaccgaacacgtggagtggagcttatcaatgttggggaaaagaaaatagagaagcaccattaaggacggcatgcccaccgtgtgtaccttgtgggcttgtaagcaattttgaggtgaagacatttgac

SEQ ID NO: 5333 - DNA, 198 bp, Lilium asiatic
  Clone ID: LIB3230-039-P1-K1-B6
cgctgatcgtatgatctttgaccgagaggctattagagctgcagcaaggaagcatggattgctagccacctttgtcgcaaaatactgattagatgatattggctctgcatctcatgtacatttaagttcgtgaaaaaatggagttaatgtttttatgggaacctgagcattaaattaactatttggaatgtcaaaagt

SEQ ID NO: 5334 - DNA, 100 bp, Lilium asiatic
  Clone ID: LIB3230-039-P1-K1-B7
tcgaagtatataagaacatataaaaatgatatatatgaatctcaagcactgaatggggtgaactatggaaatttatgcgtaagaagatcagtttgatgta

SEQ ID NO: 5335 - DNA, 340 bp, Lilium asiatic
  Clone ID: LIB3230-039-P1-K1-B9
cggacgcgtgggcacggagctgctgttacagtactgccgaggtcgcagtccctctcagatcgcgagttgccggagaggtgtcgagcacaaggcccacgccggcacctccactcgcctctggccccacgacgttctcgaggccctcgacgacgccgtcgccaacaatccccgggaatccgccctcaaggttgccgactactgattctttgtcgaagttatggcaagtactgcatgctttatcattgtcagtagaaatgacattcctatatatgaagctgaagtcggttctgccgttaaaaaggaagaagcttgccaccagcaccagtttatattgcattgc

SEQ ID NO: 5336 - DNA, 196 bp, Lilium asiatic
  Clone ID: LIB3230-039-P1-K1-C11
tgagatcatttggatgccggcaccaaattttacggtgccatatctgatcgtcggcgctgtgctccgccgccctcatctccgctgccctcatctccgtcgtggagaagagcatgggagttgaaatgaacacctcgcagccggtcgaggcatcgacggaggacgtcgatgcgctgctcgaggctgctcgatatgatga

SEQ ID NO: 5337 - DNA, 118 bp, Lilium asiatic
  Clone ID: LIB3230-039-P1-K1-C2
atcatttatcatattagagttattattctctaaagtaaattctttccagagtttttatggaagaaccaagcatactcattgttattttttaatgagttgaaattaactcttaataggt

SEQ ID NO: 5338 - DNA, 442 bp, Lilium asiatic
  Clone ID: LIB3230-039-P1-K1-C3
atcatttatcatattagagttattattctctaaagtaaattctttccagagtttttattgaagaaccaagcatactcatgtttattttttaatgagttgaaattaactcttaataggttcttattatcagaaattcagtttcataaaaaagtttgacgatattgatttcaagatcagataccgatggtcatagcttggctcataagtagcacaagctatgtttactagtatatattgacccttttttatgtaggggcaaaaatgatacatcaaggttttcttttagaatgaaaattgatttctacttttcttttacgagttcaattatacttttaaactctggattattgtttcggttaatattcatttttaaattttttgaaaggaatcttaatcaattttacctcttttggtgtaatataattattatttggattggttt

SEQ ID NO: 5339 - DNA, 294 bp, Lilium asiatic
  Clone ID: LIB3230-039-P1-K1-C6
ctgatagtttgatctttgtatcggggggcttttaaagctccgcaaggaaacatggtttgcttgccacctttgttccaaaatactgcttatatgatattggctctggatctcatgtacatttaagaatgtgggagaatggagttaatgatgttatgggatctgaggtatcaaatttacaatatgtaatgtcaaaagttggagaatgtttcatggcaagagtactgaatcatctttcgtctatcttagcattcactgctccacttgcaaacagttatgacaggatccaaccgaaca

SEQ ID NO: 5340 - DNA, 325 bp, Lilium asiatic
  unsure (1)..(325): unsure at all n locations
  Clone ID: LIB3230-039-P1-K1-C8
cccacgcgtccgatggatgccgaggaagccaaggcgaagcttttggctgtggcagaagaactgggtcacgaaatctgtgtgttcacaaattcggcaatatctacaactcccagtgaaccatctgcatcttatgaagaagaaccagatgatttttatgagctaacaccggaagattattatagaatcacttctgaccgtatgggagcaaaatttcaattgctgaagacccgtaaactccgggaagcagaggctgaagtgcagaaagctgctnngagagcaagagtaccaaaagctacaaataggggttcgcttccttgataactac

SEQ ID NO: 5341 - DNA, 316 bp, Lilium asiatic
  unsure (1)..(316): unsure at all n locations
  Clone ID: LIB3230-039-P1-K1-C9
gttacacatacggtgaaatggaccataatcaagatgctcacaggcagagaattattgattggataaatgctacaaatggttgtgctggcgcatttgatgtcactactaaaggaatcctccacacagctttggaaaaatgtgagtactggcgcctatctgaccataagggaaaaccacctggggttcttggttggtggccatctcgtgcagttacattcatagagaatcatgatactggttccactcagggtcattggagattcccggctggcaaggaaatgcaaggatatgcatacatnctgacacatnctggcac

SEQ ID NO: 5342 - DNA, 213 bp, Lilium asiatic
  Clone ID: LIB3230-039-P1-K1-D1
tctcttttggaatacttattatatattttgtattttttttatattatctcacaggcagagaattagtgattggataaatgctacaaatggttgtgctggcgcatttgatgtcactactaaaggaatccttcacacagctttggaaaaattgtgagtcctggcgcctatctgaccatattggaaaaccacctggggatcttggttggtggccat

SEQ ID NO: 5343 - DNA, 430 bp, Lilium asiatic
  Clone ID: LIB3230-039-P1-K1-D10
ggcggccatcgctctttgaaatccgcagaggtctaccaacccaaccagaacaggtggtcattcgtttcggatattaacacccgaatggttcctttcattggtggtggctaccaaggccggtggtacctgaaggggcttggacctcagaggcaggtcctaagtgacgtatactaccctgaaacagatacctggtgccctgttttcgatgggctggttagtggctggaggaacccaagtgtctgtcttgaagggcagctttacgccgtcgactgtaaagatggttgcaggctgaaactgtacaatgcagcctcagattcatggaacctgcacgctgacagcaggatgcacttaggcggctctcggtcggtggagccgctgctcttgtcacactgaaatggaagctgtgtgtggtgcgcaataatatgagcat

SEQ ID NO: 5344 - DNA, 385 bp, Lilium asiatic
  Clone ID: LIB3230-039-P1-K1-D12
atttcaagctctgtccgaagctcagcagcagagcttcggatccatggaagccatcaggaagcaggccaccaagctcagggagcaagtcgccaagcagcagcaggctgttttgaagcaatttggaggtggtggatatggaaactctgacaatatgattgatgaagcagaatatcaacaacatcaaaagctagaaaaactttatatatctactcgttcgaccaagcattttcaaagggacattgttcgtggtgtggaaggctatattgttcacggatccaagcaagttgaaattggtaataaattgtcagaagatggtagaaaatatggtgttgaaaacacctgcacgagtggctccacattatcaaaagcttgattaaattttgga

SEQ ID NO: 5345 - DNA, 252 bp, Lilium asiatic
  Clone ID: LIB3230-039-P1-K1-D3
atcattcatgatattagagttattattctttaaagtaaattcttttcagagtttttagggtagaaccaagcatactaatgtttattttttaatgagttgaaataaacttataataggttctcattatcagaaattcagtttcattaaagaagattgacgttattgatttcaagatcagttaccgatggtcatagcttggctaataagtagcacaagctatgtttactagtatatattgaccctttaatatgt

SEQ ID NO: 5346 - DNA, 223 bp, Lilium asiatic
  Clone ID: LIB3230-039-P1-K1-D4
gcgaggagttggcctataagaacaccgtcgaatgcgtaacaggaattgtattcaggacgatttcgacgaagggcatgctcgccgtgtacaactccttgtccgaggatggtaagaaggaatttgacgctgcatatagtgcattctactaccctagcatggacattctgtacgagtgctaccaggatgtggcttgtggaagtgagattcgaagtgttgttttggt

SEQ ID NO: 5347 - DNA, 68 bp, Lilium asiatic
  Clone ID: LIB3230-039-P1-K1-D5
actgcgccaacactgacgcgtatatggacctatgctttggatttataaggcattttgccgactttgaa

SEQ ID NO: 5348 - DNA, 327 bp, Lilium asiatic
  Clone ID: LIB3230-039-P1-K1-D7
ctccaatctccaatcctcaatcccctctcaaattcctctgatggcgcccaaggccgagaagaagcccgcggagaagaagccggtggcggagaagcctgccgccgaggaggagaagaaagctgccccggcagcagcaccggcggagaagaagccggccgagaagaagcccaaggccgggaagaaggtcccggcctccaagggcaaggagggggagaagaagaagaagaggtcgaagaagtcggtggagacctacaagatctacatcttcaaggtgttgaagcaggtccaccccgacatcgggatctccagcaaggccatggggatcat

SEQ ID NO: 5349 - DNA, 310 bp, Lilium asiatic
  Clone ID: LIB3230-039-P1-K1-D8
gccgaaacttattcgccgcctttgagagatcgagagagacgatggagggcggcgacgatgcggcggtggagagggtggtggactccaaggaccagcagcaacagagcaaagccttcgacaagctcaccgaccgcgtcgaggaccgtcagctcgactccacccgcgtccaagaggcgatggcgtcgcttgcttcatctagagaagctgatctgaatgcaatgagattgagggagaaagagcttgctgcagtgaagatcaatacctctgatgtggacatcattgcgaatgagctcgagctggacaggaaggt

SEQ ID NO: 5350 - DNA, 302 bp, Lilium asiatic
  Clone ID: LIB3230-039-P1-K1-D9
cggacgcgtgggctcgacgacggtgtacccgtcatcttcactccggcgaacactgacgacaatgttgtccagtacttgagtgatgtaagcattaagttccatgcccccaacatctgtactctatcgacagtctggcagctggccaaggccgacgacaatactgggaagcgctatgtgaccgtcgggggagttcccggcaaagagaacacttggttcaagatccagaaatctggcaagtatgcatacaagctggtgtacttgccaagtgacgagaatacctgcagcgatttaagcatttacta

SEQ ID NO: 5351 - DNA, 408 bp, Lilium asiatic
  Clone ID: LIB3230-039-P1-K1-E11
gtgctaatgataagaccgagcacattcctagtattgccctgccaggccctaaaagaaaatcaggggttctcagggtttcattcaagagaagatcttacgatggggatgaaacaactgaattttcttcctcgaaaagattcttatatcgtccaagagcaggactgtcaatcccatattcaagtgagaaactaattcaaggatgctggtctgttcttgaaccttccacctttaagcttcgaggagaaagctactttagagataagaagaaatctcctgctcctagccatgtcgcctacactccactaggtgttgacttatttgtatgccaagccaaaatacatcacattgctagtcacatagagcttccgaatgtgaaggcacatgagaaagttcccttctcttctgatc

SEQ ID NO: 5352 - DNA, 148 bp, Lilium asiatic
  Clone ID: LIB3230-039-P1-K1-E2
actttacacgctgctagtttgcaaattgtacaacggctaatatatacacgggggcgtagggtcaagatgatgtactcagtacctgcaattctatgaggcatatgaagtcataatcgcttagtcagaggtagtacctgactcctgaggg

SEQ ID NO: 5353 - DNA, 326 bp, Lilium asiatic
  unsure (1)..(326): unsure at all n locations
  Clone ID: LIB3230-039-P1-K1-E3
gactgtcaccgcccaggctgacaaacctcccagaaaggacccatgacagaatgaagcgaaggtcgtctgaggacttggctacagatagcaggagcttcagaagccagatagatgattcagacccactaaactttgctggcccgaagagtctcgctgagctgaagagtacgaaggagagctcccaagaacgctcgaacaagagtgttactgcccgactgtctactgagtctggaaacacagtgggctttcaagatatcggtactgaagcaatgtcagttgctgtgaagcctgtccgtggcggngaagagttcaaggttacgacaact

SEQ ID NO: 5354 - DNA, 312 bp, Lilium asiatic
  Clone ID: LIB3230-039-P1-K1-E4
gcgaggagtcggcctataggaacaccgtcgtatgcgtaacaggaatcgtatccaggacgatttcgacgaagggcatgctcgccgtgtacaactgcttgtccgaggatggtaagaaggaatttgacgctgcatatagtgcatcctactaccctagcatggacattctgtacgagtgctactaggatgtggctaggggaagtgagattcgcagcgttgctatggctggacgccgattttatgaaaaggaaggcctgcctgcattcccaacgtgcaagattgatcagacaagaatgtggagagttgtacagagag

SEQ ID NO: 5355 - DNA, 225 bp, Lilium asiatic
  Clone ID: LIB3230-039-P1-K1-E5
tcgtagaaatcagattacgctcttaatgaggatcttactattggtagggatggggcttgtttatacggtcaggcaacagtgtatggtagctctgctggaggtgttgtcatacttgaagatggtaatattcatgtatctgtacatttggacagttttgatgcaaatagtactttgacactggtacctacagaagggagagtatgcttaaatgaactaccggatgac

SEQ ID NO: 5356 - DNA, 296 bp, Lilium asiatic
  Clone ID: LIB3230-039-P1-K1-E8
ggaatgtctcgacatttaattaacattttggcgcacatcgacttgctctctacattagggattttgtgggcggcttgtcccatctctatcaaatattgttgacagtccgacatcacaactcctttgttcgagttgattaaggcatagaagaagttttaatgacttgataaacacgaagactcttttcaattgttgaagaatcactcatgctccatttcttgctttgccttattagcaacgatctttgaagttgagatagatgcaaggaactatggtttgggtggtatactctggta

SEQ ID NO: 5357 - DNA, 185 bp, Lilium asiatic
  Clone ID: LIB3230-039-P1-K1-E9
ctgatagttagatctttgttcgtgaggctattagagctgcggcaaggaagcgtggattgctagccacctttggtccaaaatactgcttagatgatattggctctggatctcatgtacatctaagtttgtgatagaatggagttaatgtatttatgggaacttaggtctaaaatcacaatattgaa

SEQ ID NO: 5358 - DNA, 437 bp, Lilium asiatic
  unsure (1)..(437): unsure at all n locations
  Clone ID: LIB3230-039-P1-K1-F12
gatagagcagattctgagggtgaagaagctggttatcagcctgcacttactaagcaaactgcaaaagattcttttcttgctcagagtacgcaacttggcagcggaacaatgcataatgaggagtctgagaggcatgagaaagctgtagatgaaccagaatcatctattgggatcacagacaattctgttgatattgtaaggatgcaggttgataatgaagtgcaaggaagacctgaaaatggttcccgccctcaaccagcagagccgagaagacgacaacccagcaggagggttaaggctagaacgatctcaagaactcacactatgaaagtatgcttggaggatgcggatgctttccttgggaaagcttctgaatcagggagtgatcgggatcgtaatgctgatgctgtagattctctaaatgttncagatgagag

SEQ ID NO: 5359 - DNA, 362 bp, Lilium asiatic
  unsure (1)..(362): unsure at all n locations
  Clone ID: LIB3230-039-P1-K1-F2
ccacgcgtccgggagactcaactgcaagaatttggagagtttcagatggtccttgtggttctaacatgcagatttcgacgccaagtgttcatgtcttgaaacatttcaagggtagaactaatgagaagagcaaagatgttacaacattagattggaatggagaaggaacattacttgcaacaggatcttatgatgggcaggcaagaatatggaccaaggaaggtgagttaaagaatactttaattaagcataaaggaccgatattctctttgaagtggaataaaaagggggattatctacttagtggaagcgtcgacaaactgcaattgtgtggacatgaaacantggatgcaagcaacagt

SEQ ID NO: 5360 - DNA, 264 bp, Lilium asiatic
  Clone ID: LIB3230-039-P1-K1-F3
ccgacccacgcggtccgcttgggcagcatatcctatgttcgcgtgtgatcgctgtttgcaccgggtggaatatcatttgctggctgaagggagagccttgtgatggttgttgacaaaaatgaatttcaagattttagggtaataaagaatcttgaggggagattaatcggtgcagaccgtgctaaagatcttgctgtcttgaaggtggaagcctctgaagatcttttaaagccaatcaaagtgggccggtcatcttctcttaga

SEQ ID NO: 5361 - DNA, 265 bp, Lilium asiatic
  Clone ID: LIB3230-039-P1-K1-F4
gagttctgacacaacatatcgagaacctatacctgtgatggaactagctgaacggatggcacggtacgttcatctgcacactctttattggtggatgcgaccttttgcctacctaatcattcttgcaggatatgatagagacggcccacaactttacatggatgaaccctgcaccatttcacacagatactattgcgctgcactggtgacgggtaggcacgcctgcataaaccgcgcatgagacgctgaagctgtctgaaatgac

SEQ ID NO: 5362 - DNA, 325 bp, Lilium asiatic
  Clone ID: LIB3230-039-P1-K1-F5
gcattttcgctccattgtcggatttccctgttctatcttctactcgttcttcgattgtggaaaatttcaatggggcagctagtagattcagggattggtccattaattctattgctgaaagcccaagagaagttggttcttataatctagtgaacttgacattcccatctgtagatcagtctgtagattcatatcccatctttagtacacataaccaagaccaaccgaaggctgagacccaaattggagttgagatttcagtgagcactgaagaagaaattcaagaattggatactggtattgaagatgttgtgaatgatgtttc

SEQ ID NO: 5363 - DNA, 288 bp, Lilium asiatic
  Clone ID: LIB3230-039-P1-K1-F8
ttgggctcattccttcttgtgttcatcctgttatgcaagagttggggttaataggcttacgcattcaaagaatgccaagtgagccagatcttgagtttggcattccttctcaatacagctatatgacggtatgtgcaccatcatgccatgattgctccaccatgcgtgcttggtgggaagaagacgaggagagacgatcgagattctacaagaatgttattggatgcagtgacgatcccccttctcgatgcacacctgagatagcacacttcattcttaagccacact

SEQ ID NO: 5364 - DNA, 354 bp, Lilium asiatic
  Clone ID: LIB3230-039-P1-K1-F9
atttaatttaatctatctgaattctcaaagcatacccaactttatttaatttgatccatctgaattctgaaagcctacccagcttaccatgttcacttaaattgcttgacgaatcaacttaccgatttgaattgagagcatatcactacttacgtatagctggctagttgtttctactgggtgttaatatttcaatttgttgtagttttttagcttttaccttgttgtgattatgtgattaatcatcagaaaatggaagcattgtaacctaaaaattgaagccattactatttattgatactggatggttggtgcatggtaaacaatagtgctggcaatgtactacaatttttt

SEQ ID NO: 5365 - DNA, 281 bp, Lilium asiatic
  Clone ID: LIB3230-039-P1-K1-G1
cccacgcgtccgcggacgcgtggggttttatgagaagttggtggatcttcttgatttggcattatctgcagacaccgtcaacactgttaagaatctaagagagattatggaaactggagtggagcctttagccttaatgtcacagattgcgacagtaataactgatattcttgctggtagctacgtattcactcgagaaaggctacgtcggaaaattttctgccgaccaactttgtccaaggaagacatggtaaaaattggggcaggctttgaaaacacta

SEQ ID NO: 5366 - DNA, 244 bp, Lilium asiatic
  Clone ID: LIB3230-039-P1-K1-G11
ctttacaaaaatgaaagatttgacaaactcgcggatgtgttctcttttggtctcatcctttatgagatgattgaagtttcaccatcttttaatccaagagccgctgaagatgttgccaaaatgatttgcttggaaggaaggagacctccactaaagaacaaatcaaaaggccattcttgtgacctaaaagagttgattgaagaatgttgggatccaaatcctgaagtgaggccaccatttttcg

SEQ ID NO: 5367 - DNA, 435 bp, Lilium asiatic
  Clone ID: LIB3230-039-P1-K1-G12
cccacgcgtccggcggttccggcggagaagaagcctgctgagaagaagccgaaggccgggaagaaggtcccggcctccaaggagggggcctctgacaagaagaagaagaggtcgaagaagtcggtggagacctacaagatctacatcttcaaggtgttgaagcaggtccaccctgacatcgggatctccagcaaggcaatggggatcatgaacagcttcatcaatgatctctttgagaagatggctcaggagtccgcccgccttgctcgctacaacaagaagaacaccatcacctctcgggagattcagacttccgtccgactcgtcctacccggcgagctcgccaagcacgcccgttttgagggcaccaaggcggtcaccaaagtcaccagcgcttaaggtctctactgtctaccttttgtgttcagacttgtt

SEQ ID NO: 5368 - DNA, 93 bp, Lilium asiatic
  unsure (1)..(93): unsure at all n locations
  Clone ID: LIB3230-039-P1-K1-G2
ggagactgaactgcaagaattcggagagtttcagatggtccttgcggncctaacatgcagattatgacgccaagcgtttattatctgaaacat

SEQ ID NO: 5369 - DNA, 429 bp, Lilium asiatic
  unsure (1)..(429): unsure at all n locations
  Clone ID: LIB3230-039-P1-K1-G3
cgaaaactatgcaaagagaggccttgttcgacttagggagatatttacccccggtacactgactgtgcctaaatcacccaatgatctgaaggagcttgaatctattcataaggtattggagctctatgtgtggttgagcttccgaatggaggactcctttccagatcgagagttggcttcatcccagaaggcgatctgcagctcattaatcgaagattttctagagagattaggatggcagaagcctgngacaggaagctatcaatctcgtctaacacagcttcaaaggagacttcagtctagttcgacggacccttaggaggaatcttcataggaataatctaatttggcatcgaatattgtaaattagtaccatggatagcaagttggaaagtcgtgccatccgtgctttgaagaatacatgtttat

SEQ ID NO: 5370 - DNA, 101 bp, Lilium asiatic
  Clone ID: LIB3230-039-P1-K1-G5
cggacgcgtggggagatcccatacttctctcccggcgggtccgacctccaaccctcatcagatacaatgaaggggattgctgtctacctcctggctttact

SEQ ID NO: 5371 - DNA, 406 bp, Lilium asiatic
  Clone ID: LIB3230-039-P1-K1-H1
tccaaatatcagaaggaacgagatcaaacaaaccaaggtaggtgcactcgctaggaactggtaaagcaaaaaacttagccattttgtagccatcacaagagagacctgagctaacatggcctagaacaccagaccgagtaagtaaagtctagggcttgatagatgtcctaaacggcgatgccaaagctcgacagtagtcgctggagaaatatgagcagtgatagaagaaacaagagtgacaaaggagggaacatgcaagtagtctagaatatacagagtaccccgccgagaactagcgccaacagttctaccggagtacggatcgtgcacaaaacaataaatagaagggaatgtgaccttcaatcccaacaaacaaagggcactgggaatgatcaatttcaaacga

SEQ ID NO: 5372 - DNA, 352 bp, Lilium asiatic
  Clone ID: LIB3230-039-P1-K1-H10
gcaacccaattatcagtaatgtctgaacctactaatgtaccggacaccttggaaagcccagaaactagtgaatccctcccttgggaacataatgttctgtacacttgggaaaccctaaaaactggtgaatccctcacttgggagacgtacagatgcacgatgcaaactgactgcaattttgtttgctggaatggtaccgcacttatctggtctaccggtacctccggcaaaggcagtggatgctacctaaagtttcagagggatgcaaagttcgacatttacaacagtgccaatggttttggggggcggttccaatttggttggccggaagcaggttccattttgaccgacc

SEQ ID NO: 5373 - DNA, 343 bp, Lilium asiatic
  Clone ID: LIB3230-039-P1-K1-H11
gctgtttggtcacgggtgagtatggatggacggccaacatggagaggattatgaaggcccaagcgctgggggactccagcatggctggttacatgtcaagcaagaagaccatggaattaacccggagaactccatcatggaagagctgaggaagcgggctgatgctgacaagaacgacaagtcagtcaaggaccttgtgttgctgctgtttgagactgcactgctcacctctggtttcagcctcgatgagcccaacaccttcggcaacaggattcaccgcatgttgaagcttggcctcaacattgacgatgatgaagtatcagccgatgctgcggacactgag

SEQ ID NO: 5374 - DNA, 218 bp, Lilium asiatic
  Clone ID: LIB3230-039-P1-K1-H3
ctccaatccccaaaccgcaatactctatcaaacccctctgatggcgccgaaatccgagaagatgccctcggagaagaagccggtggcggagaagcccgccgccgaggaggagaagaagacagtctcgtcagcgtcggagaagaagcccgccgaaaagaagtccatggctgcgaagaaggttccggcgaccaatagcaatggagggggagtagaagaag

SEQ ID NO: 5375 - DNA, 336 bp, Lilium asiatic
  Clone ID: LIB3230-039-P1-K1-H8
ggaacttactatgaatccactgatttctgccgcttccgttattgctgctggattggccgtagggcttgcttccattggacctggagttggccaaggtactgctgcgggccaagctgtagaaggtattgcgagacaaccagaagcggaaggtaaaatacgaggtactttattgcttagtctagcttttatggaagctttaacaatttacggactggtcgtggcattagcacttttatttgcaaatccttttgtttaatttaatcctaaaattagaaatgtgaaaacgtacgttatgcgcttctttcttagtcttagtttattttattaacttggact

SEQ ID NO: 5376 - DNA, 303 bp, Lilium asiatic
  Clone ID: LIB3230-039-P1-K1-H9
aggtcgccggctagggtttacggcgaaggcggaagggaaggagaggaggagcagcgagatgggggaggctcggaagatcgtggtttcatctctccagtttgcttgctccgacatcgtctctcaaaacgtcgacaccgccgagaggttggttagagctgctcatgccaagggtgccaacattattctcattcaggaactatttgaaggctactatttctgtcaagctcaaaggggtgatttcttccaacgtgctaagccttataaaggacaccctaccatatcaaggatgcagaaacttgctta

SEQ ID NO: 5377 - DNA, 350 bp, Lilium asiatic
  Clone ID: LIB3230-040-P1-K1-A12
ggatacctggcctttatgcattgagtttttgaagagcggaaagatcgatgtgaaacctctgataacacaccgatttgggttctctcaggaggaggttgaggaagcttttgaagtcagtgctcgcggaggaagtgcaatcaaggtgatgtttaatctgtagctgctcagcgagccttttgcctgtagcagtgatctagtctcaaattatgagcaataatgcctatcaaggcgatgtttaatctgtagctgctaagcaagctttttacctatagtagtgatctggtctcaagttatgaacaataatgactccatgtttgaaccataaatctatagtcaagtggttgggctgg

SEQ ID NO: 5378 - DNA, 286 bp, Lilium asiatic
  Clone ID: LIB3230-040-P1-K1-A2
cgcaagagtcggttctcagttaatgggttttttcatctatcattttatgggaacatcgaggttcattcagtatacaggcgtacatgatgttagtgttgcgaaaattgatccacaggcccctctggaaaaagtctgccttcttggttgtggtgttcctacagggctgggagcattttggaatacagctaaggtggaagctggttccattgttgccgttttcggccttggcactgttgggcttgcagttgcagtaggagcaataacagctggtgcctctcgaattatt

SEQ ID NO: 5379 - DNA, 227 bp, Lilium asiatic
  Clone ID: LIB3230-040-P1-K1-A3
cggtcggccgcgcgttcgaatacactcttttgactgcatcagatggatcagatcttgctctacaagcttaaatacgggctattgtactgaatgtgggaatggccaatgctcctgacattgtgatgctttaatggagagcacacaggtaaggaaacttacatttactggttcaactgctgttgggatagaagcttatcgctgacctcagttcatacttgctaaaaagg

SEQ ID NO: 5380 - DNA, 362 bp, Lilium asiatic
  Clone ID: LIB3230-040-P1-K1-A7
cccacgcgtccgcccacgcgtccgccttctcgtccggcttaaaagccttatgcgtgacagcgtagggcctaaaggaggatttagttattttgttttcaaacagctcattgaaagtcgtcattatgctgaattgctgagacttggggaagaatttccggaagagctagctaatttcttgacggaacataaagatctgctatggctacatgagatattcttgcatcgattctcctctgcttcagaaactcttcatgccctggctctgtcggaagatgatggttctaacttagagattggagaagaaccaaaatcttcacatgtcagaacgcttttacctctggcagaaagaaggcgcttactca

SEQ ID NO: 5381 - DNA, 400 bp, Lilium asiatic
  Clone ID: LIB3230-040-P1-K1-A8
gggatgcgctacagggcgaggtatttcttgccctcgagtcgtacggctgctttgaggttgtgtacgacagggtcacaccagagctccggaatgagcttttcggccgtgcctggccggaaatctttggccttcccctggaggtgaagatgctcacgaaatcggatctgtccgctgacggatacgtcggacagattccaggatggtcttatgagagtttgttaatcccagatgatgcagagaagtttgctaatacgctttggccccaaggaaatctcaccttctggttcagcggagattccggtgaagcaacccatatcttcccgggcccaatattttgttctctgattccaccggcggtcaactctgatctaatccgaaagatttgattcagtcatcttaa

SEQ ID NO: 5382 - DNA, 391 bp, Lilium asiatic
  unsure (1)..(391): unsure at all n locations
  Clone ID: LIB3230-040-P1-K1-A9
gcttgctccttatgacccagattggtattacatcagggctgcttctatggcaagaaagatttatctgaggaatggtattggagtgggtgctttccaaaaaatctatggaggacgcaagaggaatggtagccggcctccacatttctgcaaaagcagtggtgccatagcccgccacattcttcagcagctgcaggcaatgaacattgttgaggttgatcccaagggggggaggagcattacttcccaggggcgccgtgaccttgatcaagttgctggaaggattactgttgtcctttgagtaattttagatgttctagtgtctcatgtgagagttaattgaatcttatgttctggtttcttttttgaaacttggntatcttttattgattct

SEQ ID NO: 5383 - DNA, 416 bp, Lilium asiatic
  unsure (1)..(416): unsure at all n locations
  Clone ID: LIB3230-040-P1-K1-B1
cggacgcgtgggcggacgcgtgggtggatgttgaatccctcaggcaagaatcaaataacaaggacacggttagttctatgaattcacgttcacatggcaagagaggcaataggaaaaggatgaaggtggactggactgccgacctacatagacaatttgttcaggcggttgagcaactggggatcgatcaggctatcccttccaagatcttagagttgatgaatgtggaagggttaacaaggcataatgtagctagccacttgcagaagtttcggatgcaaagaagacacattntgcctaaggatgaacataggagatggcaaccaaatcgcgatccttttccaagaaattacatgccgaagcctccaaattttcctccttttcatactaattatggattttcagctcaacaagtt

SEQ ID NO: 5384 - DNA, 360 bp, Lilium asiatic
  Clone ID: LIB3230-040-P1-K1-B10
gaagttcaaggagaaggatgcggggttctcaggatcagcaacattcacctatgaaactttcatgcttactgttcttcccttcctcattgcatagacgaggtacctgtttgtacaaagcggcatcaagagagtagtaaatgtctaggttttctttccagagaatgggtggagtcgtagcactcaagaagttggtaaaagaaagcaataagatgtaccgggtcatttatctctttggagtcgtattaagaagatgtatcttagaactatgaattttagaggtgtggtggattgatcatgtgcgatatgcggcgtctttgtagaccttattgtctgtgaaactatgtcgagtttattttatgt

SEQ ID NO: 5385 - DNA, 376 bp, Lilium asiatic
  Clone ID: LIB3230-040-P1-K1-B3
aatacactccctcgactgctttagctttagtggtatcttcctctacaagctaaaagacggccacttgaacggatggggttattcccaattctcctgcatataggtgatgctttaatggtgagcacacaggctaggaaacctacatttactggttcaactgctcttgtgaagatgctcacggctgggtcaactcatactgttaaaaaggtatccttggaacttggtgcgaatgcaccctgtatcatacttgatgatgccgatatagatctggccgttaacggcactatctctgcgaagttccggaacagtggacacacatgtgtctgtgcaaacagattattcgtgcaagaaggtacctatgaaaagtttgcaaatg

SEQ ID NO: 5386 - DNA, 409 bp, Lilium asiatic
  Clone ID: LIB3230-040-P1-K1-B4
aatacacccccttgactgctttagctgtttttgagcttgctcttcaagctggaatacctgcaggtgtactgaatgtggtaatgggcaatgctccggagattggtgatgctttaatggagagcacacaggtaaggaaacttacatttactggttcaactgctgttgggaagaagctaatggctggttcagctaatactgttaaaaaggtatccttggaacttggtgggaatgcaccctgtatcatctttgatgatgccgatatagatctggccgttaagggcactatcgctgcgaagttccgtaacagtgggcaaacatgtgtctgtgcaaacagaatattggtgcaagaaggtatctatgaaaagtttgcaaatgcttttgtgaaagctgctgaagaattgcaagttgg

SEQ ID NO: 5387 - DNA, 409 bp, Lilium asiatic
  Clone ID: LIB3230-040-P1-K1-B6
aagaaagcagggagatggaagcaatccatttcactgtccaagaaggataatttatacaaagatgcgatggagacttgctctcagtctggtgatcgtgatctgtccgaggagttgcttgtttatttcattgagcagggaaagaaagaatgctttgcatcatgcctcttcatttgttatgacctgatccgtcctgatgtggcactagagctagcttggatgaacaatatgattgattttgctttcccatacctcttgcagtttatccgtgagtatacgagcaaggtggatgagctcgtgaaaagtaaactcgaagcacaaaatgaagagaaagtcaaggaaaaggaagaaaaagacatggttgctcagcagaatatgtatgcgcagttgctgcctcttgcattaccagcac

SEQ ID NO: 5388 - DNA, 375 bp, Lilium asiatic
  Clone ID: LIB3230-040-P1-K1-B7
aagaaagcagggagatggaagcatttctctgtctgtccaagaaggataattgagggcaaagatgcgatggtgacgtgctctcagtctggtgatcgtgatctgtccgaggagttgcttgtttatttcattgagcagggaaagaaagaatgctttgcatcatgccttttcatttgttatgacctgatccgtcctgatgtggcactagagctagcttggatgaacaatatgactgattttgctttcccatacctcttgcagtttatccgtgagtataccttcaaggtggatgagctcgtgaaaagtaaactcgtaacacaaaatgatgagtaagccaaggtatagggtgaaaatgacctggttgcataacagaatatg

SEQ ID NO: 5389 - DNA, 277 bp, Lilium asiatic
  Clone ID: LIB3230-040-P1-K1-B8
aagaaagcagggagacggaagcattcctttttactgtccaagaaggataatcgatgcaaatatgcaatggtgtctggctctcagcacaatgatcgtgatcattccttggagtttcttgcttcatttcattgttcaacaaaagacagaatgctcttcatcatgcctctatattaattatgaccctatccctcctgatgctgcactagagctagctcggatcaacaatattattcattctgcttttccatacctcttgcacattatacgtgagtataca

SEQ ID NO: 5390 - DNA, 429 bp, Lilium asiatic
  Clone ID: LIB3230-040-P1-K1-C10
ccgtccgaattccgcggcggcccactcgtccgaagaaagcatgtagaggaagcatttctttttctgtccagaaggatatggatgcaatatgcgaggagactggctctcagtctatgatcgtaatctgtccgaggagttacttgattattccattgagcaggaaaagaaagaatgctttgcatcatgcctcttcatttattatgacctgatccgtcctgatgtagcactagagctagctttgatgaacaatatgattgattttgctttcctcatacctcttgcagattatccgtgagtatactaacatatgtgtttgaactcgtgaaaagtaaactcgtaacacaaattgaagagaaagtcaatgaaaatgaagaaaaagacattgtttctcagcataatatgtttgcgcagttgctgcctctttcatta

SEQ ID NO: 5391 - DNA, 411 bp, Lilium asiatic
  Clone ID: LIB3230-040-P1-K1-C4
cggacgcgtgggctcgcgccgcagaggaagagatgtctcacaggaagtttgagcatccgaggcatggatcccttggctttctcccgaggaagcgtgcatcacgccaccgcggcaaggtgaaggcgttccccaaggatgacccttcaaaggctccgcatcttactgctttccttgggtacaaggctggaatgacccacattgtccgtgaggtcgagaagccaggatccaaactacacaagaaggagacttgtgaagctgtaaccatcattgaaactccgcccatggttattgttggagttgttggttatctgaagactccacgtggccttcggtctcttagcactgtctgggctgaacatctcagtgaggaagtgagacgcaggttctataagaactggtataggtcgaaga

SEQ ID NO: 5392 - DNA, 405 bp, Lilium asiatic
  Clone ID: LIB3230-040-P1-K1-C5
cggacgcgtggggaaaaggttgtcagagttgtcatattgaccttcaggaatttgctcgccaaggggacatttggtgctcagatgattgatcttggattaccgcaaattgtccagaatctaaaagctcaggcatggagtgatgaggatctgatcgaagcattgagtcagctagaagcagggctgaaggacaacattaaaagattgagttccttcgataaatataagcaggaagtccttctgggtcatttggagtggtctcccatgcacaaggatccaggattctggcgtgaaaatattaccaattttgaagagaatgattttcagcttcttcgtgtcctcgtcacaatcatcgatacgtccaatgatccaacagctctggctgttgcctgttacgatgtgtcccag

SEQ ID NO: 5393 - DNA, 409 bp, Lilium asiatic
  Clone ID: LIB3230-040-P1-K1-C6
tggaacctgaagtagtattccactcgataggaattgtatctgaaggatgtgctgagattatgacacccttgcctgtaaaggagaatcaaagtgatgtgttgtttactctcaaggaagggtcccaatttcgtctcaaattgacattcagtgtaaaatacaacattgtctctggattaacttacttgaatacagtgtggaagggcgggctgcaagttgatcaggtaaagggaatgcttggtacctttggtccgcagcacgaaccctatgtggaattgctagatgaagagactgctccatctggaatgcttgctcgtggaacctacttggcaaaactcgagttcagggacgatgacaagagatgccacatgcagctggattactccttcaagatcaagaagcgatgatcgtg

SEQ ID NO: 5394 - DNA, 298 bp, Lilium asiatic
  Clone ID: LIB3230-040-P1-K1-C7
aggaacccgaagtgatagaccaatttttttgaactgtccatcaaggatatgctgtgattatatacacccgtgactgtgatgtataatcaaaatcgtgatactgtcactgtgaaagaagggtactaatttgggctgaaaaagcatgaaaggtttacaacatcactgtttatttattaactcactgtaataccacatgtaaggccagagctcactttgatcaacaaaagggaaggctttgttccttcattcctgagggcgaaccttctcttggattcctagaaggagagactggctcctt

SEQ ID NO: 5395 - DNA, 226 bp, Lilium asiatic
  Clone ID: LIB3230-040-P1-K1-D10
tcgacaatcgctctaagcatccattacttgtttatagtgatcagcaaacattgtgggcatttgcgacagacagtggttcacacaaacacctttcaaaacaagcaaatcatgcacaatggttattgcactctctcaaagtcttaacaaaactcttccattcaaacggtggactcagattaacctaggacaaatctattttaccactctagtctcttttaataaaata

SEQ ID NO: 5396 - DNA, 371 bp, Lilium asiatic
  Clone ID: LIB3230-040-P1-K1-D11
gaaatgttgacggtggcgagggccgctttttatgcgatcaaggagaagggcgtggggggcttcatcaaggagctgaaagatgaaggctacacgaaatgctttttcgatgggaatcttctgcaaaccaaacttcataatgtaggtgcaactgttgtctgagttgataaatatggtaacaagtactatgaaaaactaaaagatactcagtatggaaggcacatatgggtggagtatgccgataagggtagatataatgcatctcaggtaccgtcagagtggcatggtttggttgcacttcattactgaccacactggcgacgaacttcttatgctgaagccaaagaagtaccgtctcgtacacaaacataact

SEQ ID NO: 5397 - DNA, 407 bp, Lilium asiatic
  Clone ID: LIB3230-040-P1-K1-D12
gtgataacaaaaatcatcccaagtttcttatacactaaccacctcaaaattggaggtcttttcgacagcgacagatggacagaagagcgttgagataaatgtccttcagggtgagcgggagttcgtgaaggacaacaaatcacttggaagtttccatcttgatgggattcctccagccccacgaggggttccacagattgaggacagatttgacattgatgctagtggtattctttctgtcacggcattggacaagggtataggcaagaagcaagacatcacaattactggagccagcactttgcccagcgatgaggtggagagaatggttaaggaggttaaaatgtttactgatgaggacaaagataagagggagtccgtagagaccgggaattaccatacagaag

SEQ ID NO: 5398 - DNA, 409 bp, Lilium asiatic
  Clone ID: LIB3230-040-P1-K1-D3
gcttggcaagccattcttgccctatttattgtgactcagcagcacacaactaaggctggtaacgatctatgccaaccggatatctcaggccagagctaatccagctaatcacgcatgatcctattgggtaccctttacatccaaccacagagctaattatgcatgatcatattgagcatcctgtacatccaatactttgggctttgtattcaccagcgtgtatgttgtatagtgttcatatgccccctctggaggtttggctttcagctgattgttttgcggttttctggtggaaagagtggcgagtagcagtttgcatgtattaggtttgggctggctgggatattgtgaacaatttatctacgattgacaaatgtattaagaagtcacttcattaacctcttggatt

SEQ ID NO: 5399 - DNA, 214 bp, Lilium asiatic
  Clone ID: LIB3230-040-P1-K1-D5
gcgactctgctagatcttaggctccactttatatatataaactaacatcgaaagtgaacagggctttcctcctatccttcacgtctcaaaagcagaccatgcactctttcttctcacctgcaaaattggtctccacatcatcaaatggcctggcgggggggagtacacgggcctcatccactcaattgctggtattcgctgggaggtagtactg

SEQ ID NO: 5400 - DNA, 404 bp, Lilium asiatic
  Clone ID: LIB3230-040-P1-K1-D6
ccagaggcagttgagttacttattgattgtgttaggaaccctgtatttcttgattctgaggtagaagaacagttggctaaagttaaagctgaagtcgaagtattcataaaggaccctcaacagtttcttccggaatcacttaatcttattggcttttcgggtgcattagggaaaccgctgatggtcactgaggatattttaaaaagaatagatggatctgttatccagaagttctatcatgaaaattatactcctgaccgcatggttttggcggcttatggggtggatcatgacgacttgttaactatggcagaacctctgttgtatgatttaaatagaggtccgccagtggaggtgccaaagtctacctatattggtggtgatttgagacacaaagtagactc

SEQ ID NO: 5401 - DNA, 106 bp, Lilium asiatic
  Clone ID: LIB3230-040-P1-K1-D7
ccgactcctggagaaaagctgattttgtgtttcttgatcacctaaaagattgggggggcacttggaacattgtgtgctcaacagaaagaatgagactaccataaat

SEQ ID NO: 5402 - DNA, 401 bp, Lilium asiatic
  Clone ID: LIB3230-040-P1-K1-D9
gcgggaatcgctcttggcatcgagatgatgaagatagtgatgggcagtgatccagggcattggggacaaacagttgtagagacagacacctctcaagacaagcaaagcaggcacaatggtagtggtctctctcaaagtcttctcaagatactagcagacaaaaggtggacacagatagtgagaggacaaatcttctttacctctctagtctcttttaagaagatactagggaagcttgaggtcttctataggggagttagagtgaagagaatgctctagatgagggctataatgctatataagaggaaggagtgaatatgttcagattatgcagagagagtttttatcattgcagtacagagcatagtcatacattctagttacaagtcttccagtatcag

SEQ ID NO: 5403 - DNA, 93 bp, Lilium asiatic
  Clone ID: LIB3230-040-P1-K1-E10
cggacacctggggaaaagcatgttagtgcttttataatgaccttcaagaattggggcgctctaggggacattaggggctcacattatagaact

SEQ ID NO: 5404 - DNA, 409 bp, Lilium asiatic
  Clone ID: LIB3230-040-P1-K1-E11
tgatgcaatgcgggaggcagcattctgttactgcgatctgaagaagctcgaggtggaggcgtcgacttttatcgaccaccctcgcctaccctgctcttctgccctcaagaagatgcaagccctattggagaaattagagcatggggtgctgaatttgtcacaagtgcgggaaggagcaatgaagcgataccagggctaccagatcccatggggatggatgctggaaaatggattcgtcagccagatcaagctcgcatccgtaaagttggcaatgaaatacatgaaaagagtctcctctgagctcaaatccacacagggtggtcctgaagaagaagagctaataaaacagggagtcagattcgcattcagagtacaccagctcgcaggaggcttcaatgctgaaaccatg

SEQ ID NO: 5405 - DNA, 407 bp, Lilium asiatic
  Clone ID: LIB3230-040-P1-K1-E12
cggacgcgtggggcagatcatggttattttggagattccagcactagtgacacaaacaaagttgagcgcatggttttgagtagtgggaagctagtaattcttgacaaactgttgacacgattgcgagagacaaatcatcgtgttcttatattctctcagatggtaaagatgttggacatacttgcagaatatttatcacttcgaggcttccagtttcagaggcttgatggtagtacaagggctgatctccgtcaccaggccatggagcatttcaatgctcccggtagtgatgatttctgtttccttttgtcaactcgtgctggtgggctaggaattaatcttgctaccgcagatactgtcataatattcgactcagattggaaccctcagaatgatctgcaggcaat

SEQ ID NO: 5406 - DNA, 182 bp, Lilium asiatic
  Clone ID: LIB3230-040-P1-K1-E3
ctcagcaacacacaaccaaagcggggatctatcgatgcctaccgcatctctcataccataactaatccatctaatcacgcatgatcctattcggtaccctttacatttcaaccacagatctaattattcatgatcatattgaacatcctgttcatacaatactttgggccaatactcaccaa

SEQ ID NO: 5407 - DNA, 281 bp, Lilium asiatic
  Clone ID: LIB3230-040-P1-K1-E5
tcttggcaagccattcctgccctatttagtggtactcatccgcacacaactaatgggggttctatctatgcgatccggatatctcaggccacatctaatccagctcatcacgcatgatcctattgggtaccctgtacattcaaccacagagctaattatgcatgatcatattgagcatcctgtacatccaactactctgtgctttgtattcaccagagtgtttgttgcatagtgctcatatgccacctctagaggttagtccttcatctgattgttttaca

SEQ ID NO: 5408 - DNA, 354 bp, Lilium asiatic
  Clone ID: LIB3230-040-P1-K1-E6
cggacgcgtgggctaaagcctcacagttttgtttttttgaccttcaggaataacgtcggcaacatgacatccttggctcacatcataggtctcggacatacccgcacacgcccaaaggtctaaaacctcacgcatggatgacccagcaacggcttcgaatcatactgttaacttggagcacagctgtcggacaacacacattgaccgagtggcctcgatgcctatatccaaactgcacatgagggacacttggagaggtctaccatgcacagggacccaggacactggcatggaaatagtaccagtttttaagagaacgcctcgcagccttttcgcgttctagcacacaattat

SEQ ID NO: 5409 - DNA, 321 bp, Lilium asiatic
  Clone ID: LIB3230-040-P1-K1-E7
cggacgcgtggggtaaaggcggacatatatgtcatattgaccttcaggaatttggtcgccaagggggcatcctgtgctcaaatgattggaatcgggtaaccggccattgggcaaaatctaaaacctcacgcatggagagatgaggatctgttcgaagcattcagtcaactagaagcacagctgtaggacaacattaaaagattgggtggcttcgataaatataaccaggatgcccttgtgggtcatttggagtggtctgccatgcacaaggatccaggacactggcgtggaaatattaccaagtttttcagagaacgcttt

SEQ ID NO: 5410 - DNA, 399 bp, Lilium asiatic
  Clone ID: LIB3230-040-P1-K1-F1
cggacgcgtgggcggacgcgtgggcgcttgagcacaccatccatggcgtcctcaatggcggcgcgatccggcctccgtctcaccggagctctccgccgggcctccaccccctccaatcccctcctcgtctccaagaaccgcttctcctccgctgcccacgatgatgcctatgagacggcgaaatgggagaagatcacgtacgccgggattgtgacctgcacgcttctttccgcctggatcctgtccaagggacacgctcactatcccgatccaccggcttatccgtatctgcacattcgcaacaaggagttcccctggggtcccgatggcttattcgaaaagaagcatgctgatcattgaaatactattgctgtgatatttgtatcgtttcattcttct

SEQ ID NO: 5411 - DNA, 412 bp, Lilium asiatic
  Clone ID: LIB3230-040-P1-K1-F4
cggacgcgtgggctaaaatggattgggttccagtcttgggtttgtcactatcgttttttgatagagtgcaagatcccagaatcatgggaatcattgtttagtaggaatgtgattggttttcggaaggctgatgactattctctgaaagcgagataggaagagaaggagaaagaaatacagtcacagtgagagcagtgctaatgagatgagtgaatttcagacatcaactgaatgacagggttttgcattctgtagggaggagttggttgctctcgactgatggttactcgtgtgtatggcattctgtattcggagttttggatgtccagaggcttgcaacttccatatctcagtacacgggttaaaggtttttgttgcccaacaggcttcacctgtgtttacctttgtgaat

SEQ ID NO: 5412 - DNA, 323 bp, Lilium asiatic
  Clone ID: LIB3230-040-P1-K1-F5
tcttcgcatgccattcttgccctattgagtgggtctcagcagcacacatctaagggtgggatctatctatgcctaccggacatctgaggccagatctaattcagctaatcacgcatgatcctattgggtaccctacacatccaaccacaaatctaattatgcatgatcatattgagcatcctgtacattcaatactttgtgctttgtattcaccagtgtatatgttgtatagtgttcatatgcccccttttgaggttaggttttcagctgattgtattgctgtttacttggttatagagttgcttgtattttttatttatgta

SEQ ID NO: 5413 - DNA, 272 bp, Lilium asiatic
  Clone ID: LIB3230-040-P1-K1-F6
cagacgcctgggataaaggcgcaatgttggtgtattttcaccttcagaaataagggcggagacctgacagtgcactgctcatatcacaggccatcgatatacccaccgaaggacacatggtacatatcaacgcactgataaagcaagaaacgcgatcgattatgcctgatcatttgaaacacacgcttgtcaaccccacttcaggactaggtgtcgctcagatcaacaatccagatagaccttgtgggccacttcgtgaggtctgccatgca

SEQ ID NO: 5414 - DNA, 370 bp, Lilium asiatic
  Clone ID: LIB3230-040-P1-K1-F7
cgggaagcttactttctcggtatccctgaagcagccggggcccagagatggacttattcagtgcttcattaagagggataaatcaaattttacttatcatctctacctatgtcttagcccagccgtgcttgtcgaaaatgggaagttcctcttatcagccaaaagagttcgtcggactacttgcactgagtacgtaatatcaatggacgcagacaatatatcaaggacaagcaatagttacattggaaagctgaggtaaacaacttcgattacccagaactatcattttctttgtgtatcagcaatcaattatgaactctgcatacattgcagatcaaatttcctaggaacaaaatttttaatctacgat

SEQ ID NO: 5415 - DNA, 388 bp, Lilium asiatic
  Clone ID: LIB3230-040-P1-K1-F8
cggacagcttacttactcggtcttttctatgcatcttgacccacagatagacgggttcattgcttcattaagagggataaatcaaattttacttatcacctctacctatgtcttagcccaaccgtgctggtcgaaaatgggaagttcctcttatcacccaaaagagttcgtcgtactacttgcactgtgcacgtaatatcaatggacgcagacaatatatcaaggacaagcaccatttacattggtaagctttggtaaacaacctcaattacccagaactatgattttctttgagtatcagcaatcaagtatgaactcttcattcattgcatttcataattttctatgatcaatatccttaatttacgataatcttcctctatacaat

SEQ ID NO: 5416 - DNA, 405 bp, Lilium asiatic
  Clone ID: LIB3230-040-P1-K1-F9
cccacgcgtccgcggacgcgtgggcggatatgggaactagatcatggtaagatagcatgggtggagattagtaggatgccgccaaagtattttagagcgctgctaaggttatcggctgagcggtttgagtgtttcggacaggataatctgatatgctttacttcgtggaaccaagggaaagggcttctttatgacgttgataagaaagcttggtcatggattgcaggctgtgcactccagttgtgcaacagtcaggcatgtttttatgagccaaggtttgatacttctgtctggtaaaagcatcacttggattgagttggtgtttggaggccatgccttcttctcgctctgttatattggtgagggttaattttggaactgcgcatgtaaagcaaaaaatcattg

SEQ ID NO: 5417 - DNA, 407 bp, Lilium asiatic
  Clone ID: LIB3230-040-P1-K1-G1
gcttcaacctctcatcaatcatgtcaggccgtggcaagggagggaaggggctcggcaagggcggcgccaagcgccaccggaaggtgctgcgggataacatccagggcatcaccaagcctgccatccgccgcctggctcgccggggcggagtgaagaggatcagcggcctcatctacgaggagacccgtggcgtgctgaagatatttctggagaatgtcatccgtgatgccgtgacctacactgagcacgcgcggcgcaagacggtgacggcgatggatgtggtgtatgctctcaagcgccagggccgcaccctctatggctttgggggttgatctagtactgtgctcttatggatccgtgtttgtttattttgggtttggatggtacttctgttcttcatatttctc

SEQ ID NO: 5418 - DNA, 411 bp, Lilium asiatic
  unsure (1)..(411): unsure at all n locations
  Clone ID: LIB3230-040-P1-K1-G11
gggagcagcggcggcgaagctggatatctaacggtgcttgcggtaaactgtccggtactgaatttgttgattcgactgatgatgctggtgagaagggggtggccgcagatgtcgcggcggatcctaaacttccaatcactaagattgtgaaacctgtgcgcttcaagtcttctattatagatgatgtgcagcaggtggcgattaccttcaaagctatcaggtctgatggtcaagaagtcctggtagatgataaacatctgaaggccaataacccccttctgttgattggctactatgagcagcatcttcgctacaatcctcaaccctgaagctgaaatgttgctgctaatcgtagattttggagatttgtgctgctaagctntgtggactgacatgctcattgatgtactt

SEQ ID NO: 5419 - DNA, 215 bp, Lilium asiatic
  Clone ID: LIB3230-040-P1-K1-G3
gtgactgaggaacatctacgatccgcttgttgttgagagaacccacactgaaggagcagtgcataatacggtactaccggggcttaaagatgctgatacatctggtgcgaagcttgtacaaaaccgcgaggatagctacaagaaagcgtctactatatctcctgagtgtgagatagaatctttaggaggatgtgctaggaaaactgctgaacaac

SEQ ID NO: 5420 - DNA, 277 bp, Lilium asiatic
  Clone ID: LIB3230-040-P1-K1-G4
gtgactcatggacaactaccagccactttggtcgtattgcacccacactgaaggaggggggcatgatacgggcctaccgggtattacagatcctgaaacatccggtgctgtgctcatacaaatccgcgaggcttcgaacaagaaagcgtttaccatatgttctgagtgggagataggatctctgggaggtcgtgcctggaaaactggtgaacaccagagtgctcatataaccggacttcttcggccactcaaactgcttagcctgaaatttgtatga

SEQ ID NO: 5421 - DNA, 415 bp, Lilium asiatic
  Clone ID: LIB3230-040-P1-K1-G6
gcggatgcggctgatattgagaacacggcttttattcagaatgggatgtatgtggtggtcaatggtaagcttagggagtatcaagggaataagtatgttgatgccttctccataaggcctatagttgactataattctgttgcataccacttcattcactgcattcatgttcatctgcagaatacaacacaaaagatagggggtcttggccaactccagtcaagcccattgttgacaactcctattctcaatgaagttaaagggtatcaaactcctgtttccagcaaatcttcttctgtgcagtcaaaagctggtggaactgaggatgatatcaacaaattggtcatggctgtttttgaggaaccagcaagcatggcttgtgaccatggagtgcatgtggatgaagttgttagat

SEQ ID NO: 5422 - DNA, 404 bp, Lilium asiatic
  Clone ID: LIB3230-040-P1-K1-G7
ctaaatgcgacccaggagaaatggaatttctggcgtatgtatgactatgttgtgaaggagttaccaaaagttttagctgaaaactttgagcaacttgacacttcaaaggcatccatatttggacattcaatgggtggacatggagcattgacaatttacttgaaaaatcctgacatgtataagtcggcatctgcttttgctccaatttccaaccctataaactgtccttggggtcagaaggcattttcaaactatttaggaagcaacaaatctgattgggaggaatatgatgccacatgcctggtaaaaaagtgcaacaaaatttcaaattccatcctgatcgaccagggtgatgatgacaaattcctgcatgatcagcagttgctgccacacaactttgagga

SEQ ID NO: 5423 - DNA, 344 bp, Lilium asiatic
  Clone ID: LIB3230-040-P1-K1-G8
cctacattacccattttgcccctctcgttaccctaaccctaagagatgaagggcgcgaaatcgaagaccgacaccgctaaggtcaccaagaaggccgaagccaaggtggcaccgaagaggaaggcggcggagaagccgagcaaggcggccaagccggcgaaaaaggggaaggccggcgttgaccccaacaaacccaagcgccccgccagggccttcttcgtgttcatggaggagttcaagaaggagttcaaggagaagaaccccaacaacaaggccgtctctgctgtgagcaaggctggtggagacaaggggaaatcgatgtctgatgctgataaagcacccta

SEQ ID NO: 5424 - DNA, 359 bp, Lilium asiatic
  Clone ID: LIB3230-040-P1-K1-H12
attgcctctggccggtcatatctgttttctccaaggttacctgctgaatatgccggttggttgggtgagataaagcccttgtctcacttcaaggagaggtacatggttgacatggttttctatgttgatgagattgtgcgtgtgctacacgatcattctggggaattagagaagccttttctttatctcctgtatgggctgaacactgatagtgataaattctccaagccagcagaaattgaggagatggagaagtttgacactgatttgaagacccttcatcctatattgactgattgccgcattattaaaactgagaaggagcttgcactgattcaatatgctaatgatgtaagctc

SEQ ID NO: 5425 - DNA, 413 bp, Lilium asiatic
  Clone ID: LIB3230-040-P1-K1-H4
cggacgcgtgggcggacgcgtgggcggacccttgtgcgctctctagggttagggtttcccctcctgcagtgatctcgagaagccgatcaccatgagtcagttgcacagtgatgtgttgagggaggcaatcactcaggttactgctgatgccaaggagaagaatcgcaagttcacggaaactattgagcttcagattggttggaaaaattacgatccgcagaatgattagcgcatcagtggatctgtgaaattgccccatattccgaggcctaagatgaatgtctgcatgctcggtgatgctcaacatgttgaggaggcagagaaaacctgattagactatatcgatgttgaagggcctaagaagatgctcaaatacagggcactggtcgagaagcttgctaagaagtatcatg

SEQ ID NO: 5426 - DNA, 406 bp, Lilium asiatic
  Clone ID: LIB3230-040-P1-K1-H9
cggacgcgtgggcggacgcgtgggctcttgagcacaccatccatggcgtcctcaatggcggcgcgatccggcctccgtctcaccggagctctccgccgggcctccaccccctccaatcccctcctcgtctccaagaaccgcttctcctccgctgcccacgatgatgcctatgagacggcgaaatgggagaagatcacgtacgccgggattgtgacctgcacgcttctttccgcctggatcctgtccaagggacacgctcactatcccgatccaccggcttatccgtatctgcacattcgcaacaaggagttcccctggggtcccgatggcttattcgaaaagaagcatgctgatcattgaaatactattgctgtgatatttgtatcggttcattctctggttgaga

SEQ ID NO: 5427 - DNA, 394 bp, Lilium asiatic
  Clone ID: LIB3230-041-P1-K1-A1
gggacagggagttcctgagggcttcatggctcagggagatcctcatggagggatgcagttcttccaaggcgtcgactatggtcgtatgtcggatggcttggcaatgaatccccctcatccagggaaggagttggagcagcagggggatgggaagagtgtcatggcgcccttgcccttgccggtagtgccgccgcctatgttgcctccacctccgcctctggtgcctcgaccgatgtcacagcaacttaatggtaatagcttgagttcaagtggtggcgtgggtctggatggtcaagcctttgggtggccgaacaataatcgttgaagacccgagtaaaagacattttattctcatgccctgaacaaattaattatatctttgtatgtaatatgc

SEQ ID NO: 5428 - DNA, 395 bp, Lilium asiatic
  Clone ID: LIB3230-041-P1-K1-A10
aagaatcatagagttagggctttgagtgacttcatctctgatgtcgctcctaccatgatacaattgatatcagagcttcgtgcttggtccgaacctagtgcattcaagttttttgatgcaattcctctttgggagtttgagttggtgttcatcttgtgggggttattgcaagctatgtgcttggcctgtttttttatgcttgaaaggtgtttgatttatttcccatgatgttgaagttagagatccttcaaacaagtaggagctatgatggaagaagtcaaaaagatttttgataaagaagttcaatgaggacaacttcagattttggcgtatgtaaatcacatagtacttgtaccaaaaagaccatgtttttacctttttggtggtattttgag

SEQ ID NO: 5429 - DNA, 398 bp, Lilium asiatic
  Clone ID: LIB3230-041-P1-K1-A11
cggacgcgtgggcgagattccaggctccagatctccgagcaccagcagagagtgatgacggcggcggcatggcggcgctatggtctggcggcggtggctcttatggcggtgttatcctctcatctcgcgtcctccgccaagacacataggtcattcgtgaggaagaccgtcgcctcccacgacatcgtcatcttctccaaatcctactgcccgtattgtaaaaaagcaaaagctgttttcaaagaattaaacagtgtacctcatgttgtggagctggaccagagagaggatgggtcggatatccaaggtgctttgtctgaaattgtcgggcggcgcaccgtccctcaagtttttatttatggaaagcatatcggcggctctgatgatactgttgaagc

SEQ ID NO: 5430 - DNA, 392 bp, Lilium asiatic
  Clone ID: LIB3230-041-P1-K1-A12
cggacgcgtggggctagggcaaaatcaagggcgagcgcagcacctccagagggcgatggggaaggggacgaactcctacgaggaagcccgccagctgagggtccaagagaacctcaaacaactcgagtgtctagggatctcaaagatttcaaagagtcttcaggaggttgcaaagtccgagaaggcaataatgaaatgccattcaagccctcgagcaaagaaaagcttccaaatgatagaggtgagacgctctgggagagcaaggaatcctgtttcttcgtacgttgatagttatcaggatgatgacatagatcgcaggcggttccgcaagagaattcttagtacaagagaatataatggaaggatcgtcttatatgaagaacaagttcgtg

SEQ ID NO: 5431 - DNA, 103 bp, Lilium asiatic
  Clone ID: LIB3230-041-P1-K1-A7
gccagggccggactattctcatccgcgcaaacttgtgagcccgcgcgagcagctggtcgttgtttgtggtcatgagtacgaaaaaaccttacctcgacagttg

SEQ ID NO: 5432 - DNA, 267 bp, Lilium asiatic
  Clone ID: LIB3230-041-P1-K1-A9
tcctatgactgatataacccgagtcttgctcaaaagtgcaaaggatccaacaacacgatgaatgtacgttcgagaaggtctttacataaaacattactcaacatcattctactatccctcgtcataaactgttcatcacatcatcttgacgttgaacatcagatactccctcctgagctgcatgataagaattatcatcatcatcatcataattttcatcatactgatatgcaaactactagagaggctccgtccaaagaaattttt

SEQ ID NO: 5433 - DNA, 401 bp, Lilium asiatic
  Clone ID: LIB3230-041-P1-K1-B1
gtgacactattatgacttataacccaggctgctgcttaaaattgaaaaggatccaacaaatgatgaatgcagtctgagaaggtcatactcgaaacatactcaattatcatttcactcctcctcgtcatcatcttcctcctcatcatcctcatcttcaacatcatctacacccttctcctcttcatcatcttcatcttcatcatcgtcaaaatcctcttcatcagcctcattgttaaaatacttcaaaggattcggccaaagatcttcctttattatctcagccacctcatcagtaaatccctcagcaagacttttctgttgattttcgttaaaccaggtaaagaaactttcttcaacaagggttctcttgttccccttcttctcctgatcaccatttgcaa

SEQ ID NO: 5434 - DNA, 62 bp, Lilium asiatic
  Clone ID: LIB3230-041-P1-K1-B12
aggacgcgcgggggtagggccaagacagggactggcgcgctagatgcagggggcgaggcgga

SEQ ID NO: 5435 - DNA, 219 bp, Lilium asiatic
  Clone ID: LIB3230-041-P1-K1-B3
cgctagttggagctagtgggacagggaagagctcgataattgcacttattgagagggtgtacgatccgaccgccggcaaggtgatgattgatgataaggacattctaaggcttaacttgaaggcactaaggttgaggattgctttagtttataaagaacctgtgctttccggctctagcatcattaagatcattgcttatggaaaatacagaacaactg

SEQ ID NO: 5436 - DNA, 362 bp, Lilium asiatic
  Clone ID: LIB3230-041-P1-K1-B5
cgctagttggagctagtgggtcagggaagagttcgataattgcacttattgagaggttctacgatccgaccgccggcaaggtgatgattgatggtaaggacattcggcggctgaacttgaagtcacttcggttgaggattggtttagttcagcaagaacctgtacttttcgcctctagcatctttgagaacattgtttatggaaaagacggggcaactgaggaggaggtggttgaggcggcgaaagctgcaaatgtgcaacggttttgtcagcgggctaaccggaggggtacaagacggcggtgggagagaggggagtgcagctttcaggcgggcagaaacagcggattgcgattgcgagag

SEQ ID NO: 5437 - DNA, 399 bp, Lilium asiatic
  Clone ID: LIB3230-041-P1-K1-B6
ccaagaacctcaagcttgccattcacgaggactcccagaacaggactaagcttgctgagttgttgaggtatcactcgaccaagagcggtgaagagatgaccagcctcaaggactatgttacaaggatgaaggaggggcagaacgagatattctacatcactggtgagagcaagaaggctgttgagaactctcctttccttgagaggctgaagaagaagggctatgaggtgctctacatggttgatgctattgatgagtattctgttggtcagttgaaggagtttgaggggaagaagttagtctctgcaacgaaggagggacttaagcttgatgagagcgaggatgagaagaagaagaaggaagccctgaaagagaagtttgagggtctgtgcaaggtca

SEQ ID NO: 5438 - DNA, 399 bp, Lilium asiatic
  Clone ID: LIB3230-041-P1-K1-B7
ggaaggggcgaattatttagcttcggggaaacttgtgagcctcagcgagcagcagcttgttgattgtgatcatgagtgcgattcaactgaacctgacagttgtgaccaaggatgcaatggtggactgatgaccaatgcatttgagtatatacaaaagaatggtgggctcgagactgaggtagactacccttacactggttcagatcgtggcacctgcaaattcgacaagtctaagattgttgcctcagtatccaacttcagtaatgtcgccatagacgaagatcagattgccgcaaaccttgtcaagcatggcccacttgcaattggcatcaatgctgtcttcatgcagacatacattgggggtgtatcatgcccatacatttgcggtaggcatttgga

SEQ ID NO: 5439 - DNA, 314 bp, Lilium asiatic
  Clone ID: LIB3230-041-P1-K1-B8
gcagatgcctgaaccaacaagctctgcccttatttgattatgtgactctttccttaccgctcttgggcgtgcctcttattcaaactacctcacacaaatatgatgtgtatggttttaaaagaggggtatcattttgtgtatcgatgctctaaaaaaactgtgtactatgtaaacgtatttaaatatttatatacacttatgtgtatagagatattagactcatataaatgcatttagagacataaagccaacaaacaacttaccttttttaaaggaggccatattaatgcatttaaagacataaaagcaacaaa

SEQ ID NO: 5440 - DNA, 109 bp, Lilium asiatic
  Clone ID: LIB3230-041-P1-K1-B9
aacgacttaagatgatggccggcgaggcttttccgatgggccgtactctcgcggacatcctcgcggacattcgccgcacctcgaaaaataaattaagaacctccatgac

SEQ ID NO: 5441 - DNA, 393 bp, Lilium asiatic
  Clone ID: LIB3230-041-P1-K1-C1
cagaaccaggtgtctgcgagcttcgaatggtcactccccacgccgactcgtattttgagaatgagtggtacactgactggactggatcattcgtatcaggtcgtccctcacaccacaaccatttttttccattaacgcgtattagctattatttttgcattggtctcaacttataaatgattaccattaacacaaattaattattacttttgaattcctctaaatctaagttatttcataaatcaatggattattttctttaaaataacccggggaatttaaaaaaacaaaaaactatgtttttatttttggtattaaaaacaattatttttggccagaaagaacatgctgagagttatccctccatttcatatggtatgtgacaacacaatt

SEQ ID NO: 5442 - DNA, 398 bp, Lilium asiatic
  Clone ID: LIB3230-041-P1-K1-C10
gggaaaagctgttattgtggccacaaatatgctggaaagtatgattgttcatcctactccaactcgggcggaggtttcggacattgccatagcagttcgtgaaggagctgatgcagttatgctctctggggagaccgctcatggaaagtatcctcttaaagccgtgaaagtcatgcatactgtagctttgaggactgaagcaactattgttggaggagagaaaccggccaatcttggtcatgctttcaagaatcacatgagcgaaatgtttgcttaccatgcaacaatgatgtcaaacactcttggcacctcattagtagtcttcacccgaactgggttcatggccattctactcagccactatcggccgtccggcaccatttatgcttttacaaatg

SEQ ID NO: 5443 - DNA, 335 bp, Lilium asiatic
  Clone ID: LIB3230-041-P1-K1-C11
gggaaaagctgagattgtggccacaaatatactgggaagtatgattggttatcctactccaactcggccggaggtttcggacattgccatagcactttgtgaaggagctggtgcagttatgctctgtggggagaccggtcatggcaagtatccttttaaatgccgtgaaagtaatgcatactgtatctttgaggactgaagcaactattgttggaggagagaaaccgtccaattttggtcatgctttcaagaatcacatgagcgaaatgtttgcttaccatgctacaatgttgtataacactctaggcacctcattagttgtgtttacccgaact

SEQ ID NO: 5444 - DNA, 350 bp, Lilium asiatic
  Clone ID: LIB3230-041-P1-K1-C3
caagaatctggatttcgtacaagctgctgggctgcctcttgccattgaaacagccgatgaaggcttggagagggctgagttttcagctggtaaatcaatccttgttttgggtggtgctggtggagtaggatccctagttatccagctagcaaagcaggtctatggtgcatccaaagttgccgcgactgccagcactggaaaattggacctattgaagagcttaagagttgatttagcaattgactataccaagggaaacttcggagaactatcggaaaaaatcgatgtggtatatgacactgttgggcaaggcgaaaaggcggtgaaggtagtgaaagaaggcggtcgag

SEQ ID NO: 5445 - DNA, 391 bp, Lilium asiatic
  Clone ID: LIB3230-041-P1-K1-C4
caaagggtacttcttggacgatctgatgtttctggctggggcgcattccttaagaatactgttggcaaacatgattatcttggagagtacactggagagttgatatcccacagagaagcagataagcgtgggaaaatatacgatcgtgagaattcgtcattccttttcaatcttaacgatcagtttgttctggatgcatatcggaaaggagacaaactgaaattcgcaaaccattctcccgatccgaactgttatgccaaagtgatcatggtggctggcgatcatcgggttgggattttcgccaaagaacggataggcgcaggggaagagatattctatgactaccgatatgaagcggatcgtgctccggcctgggcgaggaaacctgaag

SEQ ID NO: 5446 - DNA, 239 bp, Lilium asiatic
  Clone ID: LIB3230-041-P1-K1-C5
ccaaggacctaaagcttgacattcacgaggactcccagaacaggactaatctcggtgagttgttgagcgatcactcgaccaagagcgtctaacagatgaccagtctcaaagactatcttacaaggattaaggatggggaaaacgagattttatacataacttgtgatagcaagacggatgttgacaactatcatttcctttggaggctgaagaagaagggctatgaggtgctctacatg

SEQ ID NO: 5447 - DNA, 393 bp, Lilium asiatic
  Clone ID: LIB3230-041-P1-K1-C9
accaactccatcgagatggcgaatatcggaattgcgctgctagcggcggtggtggcggcggcggtggtgtcggggtcggcgcagcagatcccgccgtgcgcgtcgaagctgatcggctgcgcgcagtacctgaactcgacgagcccgccggctagctgctgcgggcccctgaaggaggcggtgaagacggaggcgccgtgcctctgtggcttgtttaacgacacgtcgcttctgaagaccttcaacatcgacctcaagcaggtactccagcttcccaaggcttgcgggatcacagagagtaggacgaccctgtgctccaatgtatccgccacgggtcctcccaccttttcgaccggtccaacttcagcattatcctcacctccagctacccct

SEQ ID NO: 5448 - DNA, 358 bp, Lilium asiatic
  Clone ID: LIB3230-041-P1-K1-D10
cggacgcgtgggcggacgcgtgggctgtgctgtgatagccacaccatctctacaaagaagcgtaaggctatcgtcgagcgtgctgcacaactggacattgcggtcaccaacaagcttgccaggctgcgcagccaggaagatgagtgaaccagttgattgtaggtgtgtagggatatgctatatgaggaacagagtttgtctcttgaggctatgttccttgatagcgtcgattaacttagattctaagcctctgaaggagcctgatgtgccattttggattcagtattaaggttggccattagacagctgtggtcttggcaaattatctctattagatgctaaaaaaaaacatataaag

SEQ ID NO: 5449 - DNA, 252 bp, Lilium asiatic
  Clone ID: LIB3230-041-P1-K1-D11
agcccatacctcgcactcattatggacatcaccaacaacactagcacaagcaccagttcttgggatcttgacatgagcatgggaaatcagctcctcctcgatcatcaaaacctcttcgaatttggtccaccattagacacttttcaagcccatatcaacatgcctcctcaattcactggcacccaaatgccaaaccctagagatgtggagggagagcattatcaagaagaggaagaagggctgtgagcaatg

SEQ ID NO: 5450 - DNA, 252 bp, Lilium asiatic
  Clone ID: LIB3230-041-P1-K1-D12
attcgagcccataccttgcactcattatggacattaccaacaacactagcacaagcaccaggtcttgggatcatgacatgagcatgggaaaacagctccttcttgatcatcaaaacctcttaaaaattgtgccaccattaaacactttgtcaagcccatatgaacatgccttcccaattcactggcactcaattgccaaaaactatttatagtgtatgggagagcatcattaataaataggtataaaggctt

SEQ ID NO: 5451 - DNA, 384 bp, Lilium asiatic
  Clone ID: LIB3230-041-P1-K1-D2
cttgtcactaaccccacgagggttgcgaaggcaatcaaggaaaagacctgcactgcccttctcttgaaggtacaaccagattgggtctgttactgagagcattgaggctgctaaaaagtacaagcaagcaggctggggtgcaatgacgagccaccgcagcggtgaaactgaggataccttcattgctgatcttgcagttggtctggcaacgggtcaaaacaagactgttgctccatgccgatctgagcgtttgtccaagtacaaccaggtgctcaggatcgaggaagagcttggtgctagtgcagtctatgcaggtgccaagttcagggcaccggttgagccttactagaggaagtagatgactgctgaatgtgtttcacggcc

SEQ ID NO: 5452 - DNA, 368 bp, Lilium asiatic
  unsure (1)..(368): unsure at all n locations
  Clone ID: LIB3230-041-P1-K1-D3
cggacgcgtgggttcaaatccccagtcccctctttccctctccaaatacccctgatggcgcccaagtccgagaagaagcccgcggagaagaagccggtggcagataagcctgccgccgaggaggagaagaaagcggccccagccgagaagaagccggcggagaagaagcccaaggccgggaagaaggtcccggcatccaaggagggggagaagaagaagaagaggtcgaagaagtcggtggagacctacaagatctacatcttcaaggtgttgaagcaggtccaccccgacatcggtatctccagcaaggccatggggatcatgaacagcttcatcaacgacctcttcgagaagatggctcangagtc

SEQ ID NO: 5453 - DNA, 386 bp, Lilium asiatic
  Clone ID: LIB3230-041-P1-K1-D4
cggacgcgtgggcacagtcgtcggagcggagcgtagcatcagcagcagcgatggggttcgagaagcagatcttgaaggccggcgatggccccagaccctcccgtggccaaaccgtcaccgttcactgcaccggattcggtaagaatggtgatctttcacagaaattctggagcacgaaagatccgggtcagacgccattcacgtttaagattgggatgggttcggttataaaaggatgggatgagggtgtcatgggcatgcaactgggggaagctgctcgccttcagtgctcttctgttttcgcatatggacccaatgggtttccagcttggggcatacaaccgaattcggatttgatattcgagatcgaagttcttaaaatacag

SEQ ID NO: 5454 - DNA, 288 bp, Lilium asiatic
  Clone ID: LIB3230-041-P1-K1-D5
atcgagagaagggcgttaaagcagagaggatgctatcgccattcgatacattcagttcatcgccaagggtaggttctgattcttttcgacggggttccaacttaagccctgtccaaaccagaaccagcaaaccggttatgcatgggggtcgaggattggccaccggaaaccttaatgaaccttgggtcaattttaaattttcaccaaaagccgagaggccacgagcagtggacttagccgttatgaatcaacaattgtctaaactttcgttgctttgcagttgcttac

SEQ ID NO: 5455 - DNA, 394 bp, Lilium asiatic
  Clone ID: LIB3230-041-P1-K1-D9
cggacgcgtgggggatcagaagacgagtgctctgcggacaatgccagcttactcagtggaggatgatgcatctgttttagaaaaacttaaggctttggtttactcgtcagccatcaaaattcctgtaaagaccgttgagatatacatggatctcaggaagactatcgaagaacaagttcgaggttttgcagaacctttatctgacaaacttcttcctgatttacctcctgaagtgggaaatccctttactcttgttttggatctcaatgaaactctagtctactctgattggaagcgtgatagaggctggagaacgtttaaaaggcccggagttaatgctttcttggaacatatggccaagttctatgaagttgttgtgtacaccgatcaactg

SEQ ID NO: 5456 - DNA, 346 bp, Lilium asiatic
  Clone ID: LIB3230-041-P1-K1-E1
gatccaaattgaggcccatctttctctcatgaatctgccggcttcattttctctattggctctataggttcccttttaggggtgctcctataccaaaatgtgctcaaggattatcccttccgtggcttgctcttctggagtcaactactttccagtttcgcgggaatgctagatttgattttggttctccgtcttaacttgaagtatggcataccagactatatctttgttgtgattgatgcggctgttactcaaatgattgtccgtatcaagtggatgccttctcttgttctgagttctaaacttcgtccattttgcattaaacgaacattttatgctttgatca

SEQ ID NO: 5457 - DNA, 60 bp, Lilium asiatic
  Clone ID: LIB3230-041-P1-K1-E12
acgcggacgcgtggggactccatgtcgtgatcgccataacatggcccatcgggaggtggt

SEQ ID NO: 5458 - DNA, 342 bp, Lilium asiatic
  Clone ID: LIB3230-041-P1-K1-E3
aagacaccctctacgtccactcccttcgccaattctaccgtgaatgtgacatctatggcactgtcgacttcatcttcggcaatgccgccgttgtgttccagaactgcaacctctacgcccgcagacctgaccctaaccagcaaaacctctttacggcccaagggcgggaagacccgaaccagaacacgggtataacgattcataactgcaaggtcgcagctgcagcggatctgctccctgttcaatcgaacttcagctcgtatctgggccgcccatggaagcagtattcgaggacagtgtatcttcagtcccagctggacgaagtggtggcaccagctgggt

SEQ ID NO: 5459 - DNA, 218 bp, Lilium asiatic
  Clone ID: LIB3230-041-P1-K1-E4
ccaaggacctaaagcttgacattcaggagggcttccaaaacagaactaatctcggtgtgtaggtggggatcgactttaccaagatctatcgaatagatgagcagcctcaaggtctatcttacaaggatgcaggttgaggataacgagattttatacagaactggtgcgagcaagatggaggttgagtactatcatttcttttggaggctgcagaagaa

SEQ ID NO: 5460 - DNA, 398 bp, Lilium asiatic
  Clone ID: LIB3230-041-P1-K1-E6
cggacgcgtgggtgcggaactccattgtagtgaccgccactaatttctgcccgccagggggctggtgcgaccctcccaatcaccacttcgacctcgcccagcctgttttccagcagattgctcagtacagagctgggattgtgcctgttgcttacagaagggtttcatgcaggaagaaaggaggggtgaggttcaccatcaacggccactcctacttcaacttggtgctcattaccaacgtaggaggagccggcgatgttcatgcagtgtccatcaaggggtctcggactagctggcaggccatgtccaggaactggggccagaactggcagagtaacagctacctcaatggccaggctctctccttcaagatcactaccggtgatggtcgttctatt

SEQ ID NO: 5461 - DNA, 401 bp, Lilium asiatic
  Clone ID: LIB3230-041-P1-K1-F1
tctctatactcttcacagtgttcttgtccacagtggtggggtccatggtgggcactactatgcatttatacgaccgactctgtctgacaaatggtttaagtttgatgacgagcgtgttaccaaagaagatgtcaggagagctttggaggagcagtacggtggtgaagaagagttgcctcaggctaatcctggcctgaatactactccattcaagtttacgaagtattcaaatgcctatatgctcgtttatattcgcgagagtgacaaggataatataatttgtaacgtggaagaaaaagacatcgcggaacatcttagaataagattgaagaaagaacatggagagaaggaacacatgaaaaaatgagaaagctgaagcttatctttataccattattaaa

SEQ ID NO: 5462 - DNA, 399 bp, Lilium asiatic
  Clone ID: LIB3230-041-P1-K1-F12
aagattctgttcctcggcctcgacaatgccggcaagacgacgctgcttcacatgctgaaggacgagcgattgatgcagcaccagccgacgcagttcccgacgtcggaggagctgagcatcgggaagattaagttcaaagcgttcgatctcggaggacatcagattgctcggcgtgtctggaaggactactatgctaaggtggatgcagtggtgtacctggtggacgcctacgataaggacaggtttcccgagtcgaagaaggaactggatgcgctcctttcagatgaggctctggccaacgttcccttcctcatactgggaaacaagatagacattgcgtatgcagcctccgaggaggagctaaggtttcaccttggactgaccaacttcaccacaggc

SEQ ID NO: 5463 - DNA, 363 bp, Lilium asiatic
  Clone ID: LIB3230-041-P1-K1-F2
tttttgacaacaaagagtgtctttaggattcaggcaatgcaactaaatagtatcgaccacaaatcactttgacgccaacaaacaaacagaaaagacccaacagcactccatactccatacctaagagattgaaaattctgctcagcgcctttcctccctctcccggttccactgctcaatcctcgccctccgttcctcactcccttctctcaccgggctccttgtccgccttgcaggactcccgcggtacccatcatgccgcctcccaggcttggtcccgattgtcgagcctgagattcttgttgatgggtctcatgacattgatcgatgtgcttatgtgactgagcgggtgcttgctgcgtg

SEQ ID NO: 5464 - DNA, 381 bp, Lilium asiatic
  Clone ID: LIB3230-041-P1-K1-F3
cggttcttctcttgtggaggaagacaagcttgagcttgcgaccgcacttatggagaaggcaaagtccaagggggtacaactcttgttgcctaccgatgtggttgtagctgacaagtttgcaaaagacgcagagagcaagattgtacctgcatctgctatccccgatggctggatggggctcgatattggcccagactccatcaagacatttagcgaaactctggataccactaagaccatcatctggaatggacccatgggtgttttcgagtttgagaagtttgcttggggaactgatgcaattgctaagaaattggccgaactaactggaaagggggcggtgaccataatcggaggtggagactctgttgcagctgtgga

SEQ ID NO: 5465 - DNA, 406 bp, Lilium asiatic
  Clone ID: LIB3230-041-P1-K1-F4
cgagcagatatcttacaaggcgaagtgttgcaggcccaaggttggtcccctgaaatacctgagcgttacaacatttgaagaatgctccacagaagttctaagagacttttacatggacaatgagtacaggatagagtgggacaagacttgggttcagcatgagcagttgcaggttgatgaaaccagtgggacagaaattgggcgtacaattaaaaagttccctttcctaacaccaagagaatatatactggcatggcgtgtctgggagggtaaagagaagacattttattgctttaccaaggaatgtgaacattctcgggcaccacggcagaaaaagtatgtacgagttcgccttttccgatctggctggtatatcaggaaagtccctggtagggatgcatgtgag

SEQ ID NO: 5466 - DNA, 280 bp, Lilium asiatic
  Clone ID: LIB3230-041-P1-K1-F5
tcatgccacccccaccaacgagctcagagggccgcttgacccgatccggatcatacaagccctcggggcggagtactcccctaagttgagtgctccggctgccggagaaaagcgctcgccgttcggctcaccgttgtcgaattactcagcagaggaggaaggggaagagccgcgcagctcttttgttgacgtcgacgccgaggagttcatcaagaagttctacgagcagctgaaggtgcagagcccagggactgtcggcggttcgacctaattgataaaa

SEQ ID NO: 5467 - DNA, 406 bp, Lilium asiatic
  Clone ID: LIB3230-041-P1-K1-F6
acgccatcaccaccaccctgtgaactcaacttcccttgcgttctacgagttctcatgcagcagcaccctacgagctattgttgcatatacatccgtcccacgtaccgtcctctgatgagctgtgcatttcgaagattaaatctaaagcgttcggtctctgttgacattacattgctctggcgtgtctggaaggacttctatgctaaggtggatgcagtggtgtacctggtggacgcctacaataaggacaggttttcccgagtcgaaaaaggaactgggtgcgctcccttttaaatgaggcgttggtctacgttcccgttcttatactgggaaacaagatagacattgcgtatgcatccttccatgaggagctaaggtttcaccttggactgaccaacttcaccac

SEQ ID NO: 5468 - DNA, 380 bp, Lilium asiatic
  Clone ID: LIB3230-041-P1-K1-F8
tcggcccacacctacgcgtttcttttcttgtggaggaagacaagcttgatcttgtgaccgcacttattgagaaggggaagtccaaggggggacaactcttgttggctaccgatgtggttgtagctgacaagtcttcaaaagacgcagagaggaagattggacctgcattttctattcccaatggatggatggggctcgatattggcccacactccatcaagacatttagcgtaactcttgataccacttagaccatcatctggtatggacccatgggtggttttcagtttaagaagattgctgtgggaactgatgcaattgcttaaaaaatgggcgcacttactagtaaaggggcgggggccatattctgaggtggggac

SEQ ID NO: 5469 - DNA, 397 bp, Lilium asiatic
  Clone ID: LIB3230-041-P1-K1-F9
cccacgcgtccggagatggagcacatgagtgatagtgaaataagcagcgccaacagcttacagatgataccatatccagaaattggtccattttttgcaagttcatctgatagcagctatagcagtgatcaaggcagtgggaatgaagatttccatgatatcaactatgcattgtacgatgagaatagttttgatgaagcagagtttccgtttggttagtcaggtattaagtgggtcaatgtaagctggtgaagtatcaagtgaacaaggatcaggtgctcttaatgacactcgagctcttctacacttgtttgaagtatcgggcttactaagacctggagcagttattagattccctataaccatctgctgtgatgttttaattttctgtgacaat

SEQ ID NO: 5470 - DNA, 395 bp, Lilium asiatic
  Clone ID: LIB3230-041-P1-K1-G1
gccagattgtgcacaagatcatcggtgcccatagggaagaaattgagaagaagattctacagtacgcctaagtgatgatcattctgtgtttatgcatacagaaatttgatcatgaaatctatgtttgtgtgtaataataagtatccccgtgatctgttaggggatttggcactcgtgtatttctttctatattgttgtttattaaatcaatgttagactaatatttgcttgtttgctgaaatctgacttttaagtccgcttgcttcctgaaatctgatttttttttggggttgcctcagagtctgttgtgcggttgtaccattggactagtcagccaaatccgacttttaaagtgcaatggttattgtccgattgctggactgctatatggtttg

SEQ ID NO: 5471 - DNA, 241 bp, Lilium asiatic
  Clone ID: LIB3230-041-P1-K1-G11
tcgaggacgcggggaaagaatgattatttttagctgaagcgtacaaccccatgtgtgtgtaaaagatcatcgaatcactaccttaaatagatgtaacaggacggtcagccacgtccctaacagacaaacatgaccgaggaatctgttacagcaaaccaaatcggtatcataacgaatttatcagcgatctctcaaaaaattggttgggtagagccaaagtaaccgaaccactaatttttac

SEQ ID NO: 5472 - DNA, 406 bp, Lilium asiatic
  Clone ID: LIB3230-041-P1-K1-G4
cagggttattaattttttaaaataaatatatgtatatatgatatcgaataaaactaaattcttacttaaggtttcaaatattattaatttggtcttaccataggatattacataaccgattgaaaaattaaagtgtatgtactcaatactgtcaaagtttggagttcatatgctagagagaaaaaattagtgttatgaagagtaaagaggagattttgatatatatatatatatatatatatatatatatatatatatatatatatatatacatatatatacatatatatatattactctaaaaatttatttcagtactaaaaaaagattaattaattatatgtttatcaaaactattattcataaatttatgataatatatttttgtaaattaatgtaatttttt

SEQ ID NO: 5473 - DNA, 405 bp, Lilium asiatic
  Clone ID: LIB3230-041-P1-K1-G5
gctttcagctggtcgtttaaagaatgattgtctggagctggagagtactaacgtttactttgaggcagccttggaattcctacatgttgcttatctctgggagcttcctcccagtcttgaaaatgctaaacatgaggatgcaattcagtcaatggaagcctatgctgaaacagcgcaacttttcgagtctctcttaaagatttgggaggaaaaagcgaaggaaaccctctcacttatttgtacaaattttccttaaagatgtagggaaggaaagaagccgctgtaaaattagttttgttaaatggaaaaagattcaaataggtctgtgggaggaagaaaggaaggaatcatctgcaaagatcaatttcgtaagagggaaatgctatctttagtaaagattggaat

SEQ ID NO: 5474 - DNA, 75 bp, Lilium asiatic
  Clone ID: LIB3230-041-P1-K1-G7
acgtatccaggagtatcttagtgcccaagttgataaaacgttcactgcattggagggaaatgcataaggacaagg

SEQ ID NO: 5475 - DNA, 387 bp, Lilium asiatic
  Clone ID: LIB3230-041-P1-K1-G8
cggacgcgtggtctacacaataatccgaacaaaaagaagcgcagatgcagcctctttgatgtggtcattgatgaaactgtcaccaatgcgggtactaaaggggctgatcatactattgacgacgaacatttggggggtgccccatctttcaacaccatacagtccttatgtcgaggcaccgaaccattgtctgcacaggttgactacaacaaaacttcatattctgaaagtgtgaatctcatgtaggagatcttcagctcgaaaacccataggcttccaccagtcacctctatgtataatattccggaacaggccactccaatgttctaccctaattcagctttttttgttccggattttctgaatctgactctattgagctcatac

SEQ ID NO: 5476 - DNA, 399 bp, Lilium asiatic
  Clone ID: LIB3230-041-P1-K1-G9
atcgcttccatcaacaaaaccctcttcttgtcaccgtaaaaagagaatatggttaccatctgatatctacatacaacaatattaagggagcctcatgttctagacggacctccaaaattatcaatgtcaagcaagggctaacccttctcaaccggttctccgtaggcaatcgagcttccatgggatcccggacttccaggatccaatcctttcttggattggtttgtgtcgcatccatatatgaacacatactattcgtgtgtaatccttccacgggagagcagatatttcttccacccactctagaacccagtaaatgcatcggatttggctacacacattctactaaagagttcaaagtcgtcaagttctactggcctatgaaatcattaggcagaa

SEQ ID NO: 5477 - DNA, 375 bp, Lilium asiatic
  Clone ID: LIB3230-041-P1-K1-H1
gaatattcaatacttacggaccacgcatgaacattgatgatggacgtgtggtcagtaacttcatagctcaagcgctcagaggtgagcctcttacagttcagttgcctgggacacaaactcgaagtttctgttatgtttctgacatggttgatggtctgattcgactgatggaaggagataacacaggtcccatcaacataggaaacccgggggagttcacaatgatggagcttgctcagactgtcaaggagctgattgacccagctgtgactctgaaggaagtggagaacacttctgatgatcctcgccagaggaaaccagacatcacaaaagcgaaggaacttctaaggtgggagcccaaggtgacattgcgcg

SEQ ID NO: 5478 - DNA, 401 bp, Lilium asiatic
  Clone ID: LIB3230-041-P1-K1-H10
cccacgcgtccggttgatcatgcatgcacgaaggcggagatggagggctctgatgatgtgaaggtacgaggagcagaggatcaagcagaggagatgcacatgcagacggaccggatcgagaaccaggagatcaagcaccgatgattgatggctctgatgaagtgaagttctgatcagacggcgaagagggaggccgtgcatgaagactctagaagcttgtgtgagaggagatcaccattggttgtgcatgcatggtgctcggagaagaagggatgccaggcagaagacgagatctataaagccctaaggacgagcgatgaagttccccaagtctcagacgaagaagttcaccatttctctgagcctccttcatccaggaactctgcttagtgacagagtcg

SEQ ID NO: 5479 - DNA, 404 bp, Lilium asiatic
  Clone ID: LIB3230-041-P1-K1-H3
cattgggatatttcttttcaccggttcgtgttgatatcagtgctagaaatcctggtaaagtacaggcagcactaacggagaataggaggattctgcatgaactggttctagaacctttaagagaagaatactattatgagataagggagcctttctccataatgtctctactaaagagtccaatgggattgatgatgggtttcatgcttatcatggtgttccttatgccgaaattaatggagaatatggatcctgaagaaatgaagcgagcccaagaagagatgaggaaccagggagttccttccctaaccagcttgttacctgggaggagcaattaaaaatgtggtcgccgtttgcttccaacttgtccgactcctatattgcctagtttttcttttcaggtt

SEQ ID NO: 5480 - DNA, 330 bp, Lilium asiatic
  unsure (1)..(330): unsure at all n locations; Clone ID: LIB3230-041-P1-K1-H5
aaaaaanaaccaaaaaaaaaaaaaaaaaaaaacaaaaaaaaaaaaaaaaaaaaacaaaaaaaaaaaaaaaaaaaaaaaaaaacaaaaaaaaaaaaaaaaaaaaaaaaaaaaaaaaaaaaaaaaaaaaaaaaaaaaaaaaaaaaaaaaaaaaaaaaaaaaaaaaaaaaaaaaaataaaaaaaaaaaaaaaaaaaaaaaaaaaaaaaaaaaaaaaaaaaaaaaaaaaaaaaaaaaaaaaaaaaaaaaaaaaaaaaaaaaaaaaaaaaaaaaaaaaaaaaaaataaaaaaaactaaaaaaaaaaacaaaaaaaaaaaacaaaaaaaaaaaaaa

SEQ ID NO: 5481 - DNA, 304 bp, Lilium asiatic
  Clone ID: LIB3230-041-P1-K1-H6
acgcggacgcgtggggggtactatattactgaacaccaatacctcaaaatactatggtcttgcctttgtttatttgtacaaaggatactgattgatatcttggtattacctctaataggattagattccaatgccacaggcgttacctcttgcgtgggaggtgccagattaaatcccacatcatgcgttgcacccttacatgccatgggaagtggctattgaccacagacatgctgtgcctttgtgtgtatatcacaggccatttattttttaagaagatactaagctggttgattgtccctgt

SEQ ID NO: 5482 - DNA, 212 bp, Lilium asiatic
  Clone ID: LIB3230-041-P1-K1-H7
cccacgcgttcgcatcagactaccccttcaagccttccaaggtgaagttcgacaccccgtgctttcacccgaatgtcgatctctttgggaatatctgcttggacattctccaagattaggggtcatttgcttatgaaggtcggaccgtgcttttttccattcaaagccttcttggtgagcccaacaatgtctttctcggtggactcttaagc

SEQ ID NO: 5483 - DNA, 398 bp, Lilium asiatic
  Clone ID: LIB3230-041-P1-K1-H8
cggacgcgtgggttcaaatttcccgagaacgcagttgagctgtatgctgagaaggtgaacaaccgtgggctctgtgccgtggctcaggctgagtctctccgttacaagctccttggtggccttgctgtcaggagggcttgttatggtgtccttaggttcattatggaaaatggagctaaaggttgtgaggtcatagtcagtgggaagctcagggcccagcgtgccaagtccatgaagtttaaggatggctacatgatttcttctggtcagcctgttaatgaatacattgatgcagctgtaagacatgtattgctgcgacagggtgttcttggcatcaaggtgaagatcatgcttgattgggatcccaagggtaaatctgggccaactaccccattacc

SEQ ID NO: 5484 - DNA, 205 bp, Lilium asiatic
  Clone ID: LIB3230-041-P1-K1-H9
tcggcaagaaccttaagcttgccattcacggggactcccagtatcaggactaagcttggggcgttcatgtggtactactcgtccaagggcggtgaatggacttcctgtctaaacgtctatgttagaaggctgtttgttgggcagggcgcggtattccacaatagtttttacaaaaagaactatggggatgactgtggtgttcatg

SEQ ID NO: 5485 - DNA, 391 bp, Lilium asiatic
  Clone ID: LIB3230-042-P1-K1-A11
ctctttacagatagacttctgttggttttgaacatgaaacaaagtatgtcattttgggagagaaggggaaggttcagttggtgcgtgattcaaggaaaaacattcttatgaccgcttctgagctgcagaagattcctgtaaactatactcaggttgctgttcttgctgatgacatcttgaagaatgtcgagtttgatgctctgagggttgtttttaacaaatttcaatctgttgtctcatttcttccaacagtagcaaccatattatctcctgaggctgtggagaaagaatcggaatcgggtggcaagcttggtgatttggattcatatgaaattgaaagcggagagacaaaggcagaagtgcttcagaatcttactgaggttcaattttc

SEQ ID NO: 5486 - DNA, 402 bp, Lilium asiatic
  unsure (1)..(402): unsure at all n locations
  Clone ID: LIB3230-042-P1-K1-A3
gacgaactccgncgncgtatccgacgtactccgttttcgtatccgagctgtctgcgccggcgtagcctagcgatggccgccgacctccgtcgcaatggacaccggctccgccgtccgaaagaagagacccgggcactctaaaaagtcaccgatggcgataccgatccgtgaactagatggtgtagacgatatgaatgagccaaccatggccgagaagcttgctagtatagatttacttggtggtgataagacaatggatacacctagaaaagagccatctcatcctgcagtccctccaagtgcagattctgngcatgttttgttgaagcaagcattacatgctgatgatcatgcactggtattggactgtttgtacacaagggatgaaaaggtcattggaaa

SEQ ID NO: 5487 - DNA, 154 bp, Lilium asiatic
  Clone ID: LIB3230-042-P1-K1-A4
tcgaacgaactccgccgccgtatccgactatctttctttgcgaatccgagacagactgggtcggggtaacctagaaagggccgccggcctccactccacagaacaccggctccgccgaccaaaagaagagacccggtcactctaaaaaggcacc

SEQ ID NO: 5488 - DNA, 317 bp, Lilium asiatic
  Clone ID: LIB3230-042-P1-K1-A6
actgagaagcaaacaacaagcaatatacagtgaatgggatatccatcctccaaagaaaatcaaggatcccgaggcaaagaagcctgtggactgtgatgacaaggagttcatttcctatcccgaggatactaaaccaaatggcaatcgacgagtttactaaatgccatcactgtctctgatgctaataacccgaaaaccggaatgattatcgaaaatcgggtaggcaagctttggtgatttggattcatatgaaattgaaggcggagagacaaaagcagaagtgcttcagaatcttactgagtttcaattatcttgtg

SEQ ID NO: 5489 - DNA, 354 bp, Lilium asiatic
  Clone ID: LIB3230-042-P1-K1-A7
ctgtctcgtggctgagttattgacctttttacccatgtgtacaccggcatcatgcgtgcaattgctagtcatagcatactccccatttacactgataggctgacagtatagcatatactgtagctggaagatacttcctgcaaagatcatcgaggctccctaggatttggagacataggactgtgatgactagtagttcattccagatcctgagaaatctgaaccacaaggctatgacgtttttcccactgcatatacagatgctcgagttcactatactttttgtctaggattatgaaccaaatggtgaatggtcatcaccaaccttccctaaaactgactacaaagttccct

SEQ ID NO: 5490 - DNA, 412 bp, Lilium asiatic
  Clone ID: LIB3230-042-P1-K1-A9
cacgcgaacgatgctgaagggagaaatattcttgcatatcttgaagctgatggtggggatactgcgtatatcgtgggggccaaggaaaacaacccaccgattacttatataattgtcgacaaccaaacgaaaactcggacatgtattcacaccccaggacagcctactatggagccagatgaactttcccatcatagtttgttatctgcgttagatggagcaaatattgtctactttgatgtaagattacctgaaactgctttagttgttgcagaagaggcttttcgaagggaaatacctatcttagttgatgcagagaaaaagagagaggggttagataatcttctgaatatggcaacatatggtgtatgctcagaaaacttttcccaggaatggacagaaaccccatcta

SEQ ID NO: 5491 - DNA, 408 bp, Lilium asiatic
  Clone ID: LIB3230-042-P1-K1-B1
agctaatgatgctgaagggagaaatatacttgcacaacttgaagctgatggtgtagatacttcttatatcgtggtttccaaggaggggaattcaccgtttacttatataattgtcgacaaccaaacgaaaactcggacatgtattcacaccccaggacatcctgctatggtgccagatgaactttcccatcatagtttgttttctgcgttagatggagcaaatattgtctactttgatgtaagattacctgaaactgctttagttgttgcagaagaggcttctcgaagggaaatacctatcttagttgatgcagagaaaaagagagaggggttagataatcttctgaatttggcaacatatgttgtatgctcagaaaactttccccaggaatggacagaagccccatc

SEQ ID NO: 5492 - DNA, 395 bp, Lilium asiatic
  Clone ID: LIB3230-042-P1-K1-B11
atttgttgtgacaaaatgagtggagagtgaaactgagagtagagaggcaatgtgagagaaattgtgaagcgagaataagaccgtagatagagaaaatgagaggaaatataagcagagtaaatgcgatgagaaaattatgagaaaatacaaggagagaaaataagagtagggaaaataagtggatgggaaattatgaggtaattaaaataataggaaacggggaaaacaaaaatagttgatatgccattctactaggctccctgccccgctacactttactatagtggtggggtgggtggctggtggggtgggggcatatgggtgatcaattatatagcctgcaatacattttgtgttgtttcctgttactcataaaaaacaattattctgtgaca

SEQ ID NO: 5493 - DNA, 391 bp, Lilium asiatic
  Clone ID: LIB3230-042-P1-K1-B12
gtggagataagcgatgtcactgaggcgtttaggttgctcgaagttgcaatgcagcagtcggcaaccgatcatagcacagggaccattgacatggatctcattatgactggtatatctgctagcgagaggataaggcgagagagtttggttgtgaccacccgtaatttggttatggagaaaatgaaaattggtggaccgtcgaaacgtgtgggagagatgttagaggagctaaagaagcaaagcccggtggatattcatatgagtgatttgcggaatgctctctcgactctcatgagcgaagggcttgtctcttttcatggcgatgttgttaagcggatttgaaagtgcccgagctatattatgctgcgatcctttgggttaagttaaaatt

SEQ ID NO: 5494 - DNA, 331 bp, Lilium asiatic
  Clone ID: LIB3230-042-P1-K1-B2
agctaatgatgctgaagggagaaacattcttgtttctacttgaagctgatggtggggatacggcttatatcgtggggtccaaggaggggaattcaccgtttacttatataattgtcgacaaccaaacgaaaactcggacatgtattcacaccccaggacatcctgctatggtgccagatgaactttcccatcatagtttgttttctgcgttagatggagcaaatattgtctactttgatgtaagattacctgaaactgctttagttgctgcagaataggcttctcgaagggaaatacctatcttagttgatgcaaagaaaaagagagaggg

SEQ ID NO: 5495 - DNA, 216 bp, Lilium asiatic
  unsure (1)..(216): unsure at all n locations
  Clone ID: LIB3230-042-P1-K1-B4
cgaggctgagaaaanaaanctttatgttttgcttgcagctgaacgaggggacccggctcatagcatgggagccaaggcggcaacaccaccgagcactcatatagctgatgccaaccaagcgaaaactcggacacgaagacacaccccaagacatactgatatggtgccagagaaactgatccatcagagttcagttcctgcgccagagggaccaaa

SEQ ID NO: 5496 - DNA, 396 bp, Lilium asiatic
  Clone ID: LIB3230-042-P1-K1-B6
attctcgtggttgtgaaacggaccaatctacttttgtctacaccttcatcatacgtccaggtgctacttataggagccggggcgttcacactcataagcaaacaggatgcatatacagtgaatgggatatccttccttcaaagaaaatcaaggatcccgaggcatagaagcctgaggactgggatgacacggagttcattccgtatcccgaggattctaaacctcgaggccatgacgagattcccagcgaaattatagatacccttgctcagaacactttactatagtggtaggatgaatatcttgtgtggtcaggaccaaccatcccttattctgactacaagggcccctagacccaaaagaaaattaagaatcccaactacaacggagaattgg

SEQ ID NO: 5497 - DNA, 407 bp, Lilium asiatic
  Clone ID: LIB3230-042-P1-K1-B7
cggacgcgtgggtgtgaaacggaccatctaactcatgtctacaccttcatcatccgtccagatgctacttatagcatccttgttgataacactgagaagcaaacaggaagcatatacagtgaatgggatattcttcctccaaagaaaatcaaggatcccgaggcaaagaagcctgaggactgggatgacaaggagttcattccggatcccgaggatactaaacccgagggctatgacgatattcccaaggaaattactgatactgatgctaagaagccggaagactgggatgatgaagaagatggtgaatggacagcaccaaccatccctaatcctgactacaagggcccctggacccaaaagaaaattaagaatcccaactacaaggggaaatggaaggcacctat

SEQ ID NO: 5498 - DNA, 352 bp, Lilium asiatic
  Clone ID: LIB3230-042-P1-K1-B8
cggacgcgtgggagagaatttttccattgtactcaagactacacctggatcatgcgtccagatgctaggtatagcatccttgtcgataacactgagaagcatacaggatgcatatacagagaatgggacattcttcctccaaagaaaatcaaggatcccgaggcatagaagcctgaggactgggatgacatggagttcattccggatcccgaggatactaaacccgatggctatgacgatattcccaaggaaattactgatactgatgctaagaagccggaagacttggatgatgaagaagatggtgaatggacatcaccaaccattcctaatcctgactacaagggcccct

SEQ ID NO: 5499 - DNA, 380 bp, Lilium asiatic
  Clone ID: LIB3230-042-P1-K1-C10
agtacatccactgaacatattttccttttaactggacactgaatatggaactgatggaaacaaagccggcgtgctggaagccaatcactgtccaggtgcagatctgattgactttactctcaatgacagcagacgctctctacatacgcgagattctaggtcatgtgaaatgatgcaaacccaccctcttgttgttaatcagcacattaacacactctaccaggatacaacatatcgcaaccccaagtataggttcccagctaaagaacacgttgtgaactgtgttgtgaagacaactagtaactgtctgggtaagcagaccaaaaccctgaaggttcctcgagcatacaaaatacggaaggaacatgtatatgccagta

SEQ ID NO: 5500 - DNA, 391 bp, Lilium asiatic
  Clone ID: LIB3230-042-P1-K1-C2
gccgcatattccccgtccgaagatgaatgtctgcatgctcggagatgctcagcatgttgaggaggctgagaagattgggctggactacatggatgttgaagggttgaagaagatgaataagaacaagaagctggtcaagaagcttgcaaagaagtatcatgctttccttgcatctgaggccatcatcaagcagattccacgtcttcttggcccgggtcttaacaaggcagggaagttccctacactggtgactcatcaagaatctcttgagtcaaaggtgaatgagaccaaagcaatggttaagttccagctgaagaaagttctttgcatgggtgttgcagtagggaatcttggaatggaagacaagcagatctttcaaaacgtgcagctc

SEQ ID NO: 5501 - DNA, 384 bp, Lilium asiatic
  Clone ID: LIB3230-042-P1-K1-C4
gccgcatattccccgaccgaagaccaatgtctgttttctcgcacacacacaacatgtccaggtggcttttaagatgggtctggactacatatatgctgaaaggtacaaaaatatccataataacaagaagcttatcaagaagcttacaaaaatatttcatgctttccttgcatttgatgccataattacgcagattccacgtctttttgccccgtttcttaacacggcaggaaatttccctacactgatgactcatcaatgaaccttttgaaacaaatttgaacgacaccaaagcattgtttaagtttcatctgaagatattccctatctttatgttaagcggatttgaaagtgcccgagctatattatgctgcgatcctttgg

SEQ ID NO: 5502 - DNA, 402 bp, Lilium asiatic
  Clone ID: LIB3230-042-P1-K1-C5
tggccgctacctcaagaagggccgctatgcaaagcgtgtaggttctggagctcctgtctaccttgccgccgtgctcgagtaccttgctgctgaggtgctggagctggctggcaatgctgccaaggacaacaagaagtctcggatcatcccgaggcacgtctgccttgctgtcaggaacgaccaggagctgggcaagctgcttgctggagtcaccatctcccatggcggtgtcatccccaacatcaacctggtcctgctccccaagaaaacacttgagaagggtgattctgctgcaacaaaatctcccaagaagactcccaagtctccaaagaaagctaccaaaaccccaaagaaagcttaatgtatcttgtaagctccagtaggcggtgaattcgaattagg

SEQ ID NO: 5503 - DNA, 400 bp, Lilium asiatic
  Clone ID: LIB3230-042-P1-K1-C6
agtacatccactgaacatatgtcctttggaacttgacactgaatatgttactgatggaatcaaagtcaccttgctggaagccaatcactgtccaggtgcagctctgatttacttcactcttagtgacggcagacgctctctacatacgggagattttagggcatgtaaaatgatgcaatcccaccctcttcttgttaatcagcacattaacacactctacctggatacaacatattgcaaccccaagtataggttcccagctaaagaagatgttgtgaactttgttgtgaagacgactcgtaactgtctgtctaagcagcccaaaaccctgatcgttgctggagcatacagcatacggaaggaacatgtatatgtcgctatatctcagactttaggggta

SEQ ID NO: 5504 - DNA, 396 bp, Lilium asiatic
  Clone ID: LIB3230-042-P1-K1-C7
tccgccgccgctgccactcttagcctaaaccctagcttttccatctccttctccgatggcatcgagcgaagcgccggcggcagcctccatggaaatcgaggggagtggagctccaccggccactgcagccgcgccgcctcgaccgctgtttgcggcgctgatggcgcacgagatgtcggacggccaggtccagttccgcaaggtgcccgtaccggcgcaccgcttctcgccgctgaagaagcactggatggagatctatacacctgtctacgagcatatgaagatcgatatcaggatgaacctcaaggcgaggaaggtagagttgaagaccagaaaagacacgccagacgtcagcaacctacagaaatgtgccgactttgtccatgcattcatgct

SEQ ID NO: 5505 - DNA, 404 bp, Lilium asiatic
  Clone ID: LIB3230-042-P1-K1-C8
cggacgcgtgggcggacgcgtgggcactagtttccaaggcaatcaatgaaaagagctgcaatgcccttcttttgaaggtgaatcagatagggtcagtgactgagagtattgaagctgtgaaaatgtccaaacgtgccggttggggtgtgatgaccagccaccgcagcggtgaaacggaggataccttcattgctgatcttgccgtcggcttatcaacaggccaaatcaagactggagctccatgccgctcagaacgtctggcaaaatataatcaactgcttcgaattgaggaggagctgggttctggtgcagtctacgctggagccaagttcagagcacccgtagagccctactagagggtaggcttttatgagcatcgtcgatatgagtgtcgagatgagctg

SEQ ID NO: 5506 - DNA, 272 bp, Lilium asiatic
  unsure (1)..(272): unsure at all n locations
  Clone ID: LIB3230-042-P1-K1-C9
cgcacgccagagcgaacgcttttgctctagtacacaaggcaaacaaagaaaagagctgcaaggccggggggttgaagctnaagcagatagggtcagagaccgagagtatggcagctgcgaaaatgtccaaacatgccggaaacgatgcgaagaccagccaccgcagcggtgaaacggtggagaccatcatcggtgatcgttacgcagcagtctcatcaacaagcacaaaaaaaggactggagcaacatcccccaacagaacccaacgacaaa

SEQ ID NO: 5507 - DNA, 388 bp, Lilium asiatic
  Clone ID: LIB3230-042-P1-K1-D10
ggattatgctttcttgctgaaaggtcatgaggatttgcgccaagatgaacgagtcatgcagctttttggtttggtgaatactcttctacagagctcaagaaaaactgcagataaagacctttcaattcaacgttatgcagttattcccttgtctcccaacagtggcttgattggctgggttccaaattgtgacacccttcatcatctcattcgagaatatagggatgccagaaagatcttcctaaatcaagagcataggtgtatgctagcttttgcaccagactatgaccacctgccacttatagcgaaggttgaagtatttgagcatgctctgcagaacactgagggaaatgacttggcgaaagttctgtggttaaagtctcgaact

SEQ ID NO: 5508 - DNA, 389 bp, Lilium asiatic
  Clone ID: LIB3230-042-P1-K1-D11
cccacgcgtccggtatcactcagcagcttgcgatcgaggtctgcagccatggctcctagggcttcatcgaaggggaagggaaaggccatcaagggatccagggcgtccgtgattcaagagggcatgagtatgcaaaccgtgagcgagtggaccacctgggcgatgaagaaggcgaaggtgatcacccactacggctttatccccctcgtcatcctcatcggtatgaattcggagcccaagcctcacatttctcagcttctcagccccgactagggttagatgatcttgatttgagatatttgttagggtttgccgaacttgggttgagatctttggttaaggtttgttgaactttgattgagatcttaaagtttgatgaacttggattg

SEQ ID NO: 5509 - DNA, 403 bp, Lilium asiatic
  Clone ID: LIB3230-042-P1-K1-D12
agccaatatttgtcaccattctacgttccacctccaacctttcaccaatttttaagcaatactccttatcctcagcaaccttcagctataagcatgtacccacctcctgcggttgcacctggggctgcccctgccaagtactctatctctcaatacaagcctccaagtaactctggaaatcaaaatccgttacccactgtctatggagcatacagttcaagtccctcagcctacagttctgtgacaaatgggatctcaactggtagtgaggatctcacttcatcacaatacaaggaaagcaatgtttatattaatggacaacagactgaaggttcaactatgtggatacctgcgactgggcgagaaggctctgctctgcaacctggttctttctacaatcttc

SEQ ID NO: 5510 - DNA, 367 bp, Lilium asiatic
  unsure (1)..(367): unsure at all n locations
  Clone ID: LIB3230-042-P1-K1-D4
aggacgcgtggttgtgaaacggaccaattaacttttgtctacacctncatcatgcgnccagatgctacttatagggttcgggccgacaacactgagaagcaaacaggaagcatatacagtgaatgggatattcttcctccaaagaaaatcaaggatcccgaggcatagaagcctgaggactagaatgacaaggagttcattccggatcccgaggatactaaacccgagggctatgacgatattcccaaggaaattactgatactgatgctaagaagccggaagactgttatgacgaagaagatagtgaatggacagcaccaaccatacctaattctgactacaagggcccttggacccaaaagaaaa

SEQ ID NO: 5511 - DNA, 392 bp, Lilium asiatic
  unsure (1)..(392): unsure at all n locations
  Clone ID: LIB3230-042-P1-K1-D5
ggcaccctgatagcaatacaaacaacatctatatcacaagtgatcaggaccttataatttccagctgcactgggtntggggaaanaaaaaaaataagntntgcagtaggaaattttaaggtcctgatcacttgtgatatagatgtagttggaatggcaatcgggttgcccggccgcgtgggtcagcccgggatttcggtgtatgcccctggagatcgtcatcggtatgaattcggagcccaagcctcacatttctcagcttctcagccccgtctagggtttgatgatcttgatgtgagatatttggtagggtttgccgaacttgggttgagatctttgtttaaggtttggtgaactctgattgagatcttaaggtttgatgaacttggattg

SEQ ID NO: 5512 - DNA, 373 bp, Lilium asiatic
  unsure (1)..(373): unsure at all n locations
  Clone ID: LIB3230-042-P1-K1-D7
agccaatatttgtcaccattttacgttttatctccaaccttncaccaggtatgaagcaatacttccttgggctcagcaaccttcatctataagcatgtacccacctcctgcggttgcacctgagtcttcccctgccaagtactctatctgtcaatacatgccttcaagttactctggaaatcaaaatccgttacccactgtctatggagcatacagatcaagtccctcaacctacagatctgtgacaaatgggaactcaactggtagtgaggatctcactttattacaatacaaggaaagcaatggttatattaaaggacaacagactgaatgttcaactatgttgatacctgcgactgggctatatatcctc

SEQ ID NO: 5513 - DNA, 402 bp, Lilium asiatic
  Clone ID: LIB3230-042-P1-K1-D8
cggacgcgtgggcggacgcttttgcttttgtttccaaggcaatcaatgaaaagagctgcaatgccctggttttgaaggtgaatcagatagggtcagtgactgagagtattgaagctgtgaaaatgtccaaacgtgccggttggggtgtgatgaccagccaccgcagcggtgaaacggaggataccttcattgctgatcttgccgtcggcttatcaacaggccaaatcaagactggagctccatgccgctcagaacgtctggcaaaatataatcaactgcttcgaattgaggaggagctgggttctggtgcagtctacgctggagccaagttcagagcacccgtagagccctactagagggtaggcttttatgagcatcgtcgatatgagtgtcgagatgagc

SEQ ID NO: 5514 - DNA, 396 bp, Lilium asiatic
  Clone ID: LIB3230-042-P1-K1-E10
ggattatgctttcttgctgttaggtcttgaggatttgcgccaagatgtacgagtcatgcagctttttggtttggtgaatactcttctacagagctcaagaaaaactgcagataaagacctttcaattcaacgttatgcagttattcccttgtctcccaacagtggcttgattggctgggttccaaattgtgacacccttcatcatctcattcgagaatatagggatgccagaaagatcttcctaaatcaagagcataggtgtatgctagcttttgcaccagactatgaccacctgccacttatagcgaaggttgaagtatttgagcatgctctgcagaacactgagggaaatgacttggcgaaggttctgtggttaaagtctcgaacttctgaaat

SEQ ID NO: 5515 - DNA, 367 bp, Lilium asiatic
  Clone ID: LIB3230-042-P1-K1-E11
ggattatgctcggtagctgtttggttttttagatcgacgccaagatgggcgaggcatacatctgcatgggttggggaatactccactacaaagctaaagaaaaactgcggataacagaccttgcaatacaacgtaatccagtaatttccttgactcccaacagtggcttgataggctgggtaccaaaacgtgacacccttcatcatttgattcgagaatataatgatgccagaaagatcttcctaaattaagaacatacttgtacgctagcttgtgcaccttactatgaccaactaccactgatagcgaatgttgaaatatttttgcatgctatgcaaaacactgagggaaatgacttggcgaacgt

SEQ ID NO: 5516 - DNA, 379 bp, Lilium asiatic
  Clone ID: LIB3230-042-P1-K1-E12
tttttaagtatcaaataccaattgaaattaagtaaatatgctcagcactgcaagtaaacacaaagaccaacaaagattatggatagcaacgtcaaaaaactcaataaccaaatcctgaatggaccccgcgaagctggttacccctcaagcgggtcttatgctcctccacctcagtatcgctactaagatcaggatttagcagaatcagataactctgttactttgagctttagttgtgttactttttaatttctgtcttctgcactagctacctagaatcgtatgacttgtctctgtggaactgcatcaacatttgtcaaaccaggtattggtgttgaatgcttttatctgctgtttcttttctatgttggtgtgattg

SEQ ID NO: 5517 - DNA, 408 bp, Lilium asiatic
  Clone ID: LIB3230-042-P1-K1-E3
cgtcgaggatcgcagcgaggttcgcaacccggaggctctactccagcggcggcaagatgcttggcgaggaggagaaggcggcggagaacgtctacatcaagaaggtggagcaagagaagttggagaagcttgcacgcaagggtgtcaagcctggagaacaacctccagctgcaccggcaactgaagtgaagccaagtgaggcaccaggttcttcaacaaaaggtgtctcaactgacaagaaccgaaactatgcagtccttgctggaacagttgctgtcctagctggttttggttggtatttcctgtctaagccgaagaaaactgaagagacagcagattaaacatggcgcaatgtctcattttgcctgtcttttcacttaaagcgtgctctctcaccttttgagcgag

SEQ ID NO: 5518 - DNA, 407 bp, Lilium asiatic
  Clone ID: LIB3230-042-P1-K1-E4
gcttcctccccttccccttgttcagatctgcgatccatctccggccagctcgagcaatggcggatcagctcaccgacgatcagatctccgagttcaaggaggcgttcagcctgttcgacaaggacggcgatggttgcatcacgactaaggagctgggtactgtgatgcgctcactcggtcagaacccgaccgaggccgagctgcaagacatgataaatgaggttgatgctgatgggaacggaaccattgatttcccagagttcctcaacctgatggcgcgtaagatgaaggacaccgactcagaggaagagctcaaggaggccttccgcgtatttgacaaggaccagaacggcttcatctccgccgctgagcttcgccatgtcatgaccaaccttggtgagaagctg

SEQ ID NO: 5519 - DNA, 309 bp, Lilium asiatic
  Clone ID: LIB3230-042-P1-K1-E5
agtccggaccgtaccgaggttcagatttgcgatcatcaccgcacagcccgagggatgggggaccaggtgacggacgcggagatcaacgagtacaaggaggcggtgaaccaggacaacaaggacaagcatggctgcagacgacaaaggagcagaacaccgcgaagcgcccacgccgacagaacccgaccgaagccaagcaccaagacatgaaacaaaaggtggatgctcgaggcaagaccgaaccactagactgcccagagctgcacaaccagatggcccagaagatgaaggacaccgactcagacgaag

SEQ ID NO: 5520 - DNA, 405 bp, Lilium asiatic
  Clone ID: LIB3230-042-P1-K1-E6
ggatcctcgggtggcggtggggtttgcgctggatatttcgcgggctatggagtgcttgcattcacatgggatcattcatcgtgatctgaagcccgagaacatgcttttgaccgcagaccaccgaactgtgaaacttgtcgacctcggtttggcaagggaggagacactgactgagatgatgactgccgaaacagggacataccgatggatggctcctgagttgtatagcaccgtcacactgagacatggagaaaagaaacactacaaccataaagtagacgtttatagtttcgcgatagtgctgtgggagctcctacacaaccgacttcccttcgaaggaatgtccaacttgcaagcagcatacgcagccgctttcaaaaatgccaggccgagcgcagatggact

SEQ ID NO: 5521 - DNA, 394 bp, Lilium asiatic
  Clone ID: LIB3230-042-P1-K1-E7
ggtgaagcctgaacaaactgctgcaattatgaaggactttgctgagcctggatctctagcaccaactggcttattcctgggtgatggcaagtacatggttatccagggtgagccgggagctgttattcgggggaagaagggctctggaggtgtgaccataaagaaaaccaacatggctttgatcgtcggcatatacgatgagccaatgactcctggtcagtgcaacatggttgtggagaggctcggtgattatctctatgatcagggattttaggtccattttactcgtttttgtgtctacctttggcatgggtttgcatcttatctgttgatgtggttgaaatgctttgaaatggtccttggaaacttgtaggtagtgtgttggcatggtgtc

SEQ ID NO: 5522 - DNA, 370 bp, Lilium asiatic
  Clone ID: LIB3230-042-P1-K1-E8
ggtgaagcctgaacaaactgttgcaattatgaaggactttgctgagcgtggatcgctagcaccaactggcttattcctggatgatggcaagtacatggctatccagggtgagccgggagctgttattcggcggaagaagggctctggaggtgtgaccataaagaaaaccaacatggctgtgatcgtcggcatatacgatgagccaatgacttctggacagtgcaacatggctgtggagaggctcggtgattatctctatgatcagggatattaggtgcattttactcgagggtgtgtctacctttggcatgggtttgcatgttatatgttgatgtggttgaaatgcctttaaaaagggccttggaaactt

SEQ ID NO: 5523 - DNA, 400 bp, Lilium asiatic
  Clone ID: LIB3230-042-P1-K1-E9
cgcaaaaatagcgctttaagtttgttgttaaaattgtgtaacggatgagattcgattcggaaaccacgcttttcaatttcgttttttactaaggcttgaatcgcgtaaatgatacgctatccttaaagcgttattcacccccactcatcggagatgctgcttactcgagtcgtaactcgtagggcaactctcttatagttgttgtcgggtcactggcgaaccgcctcccaagataagacaagcctctggtcggtctatgcccaacaatggcggagatctgacccactattgaatccgtaacacggttctggtagaaacaaacttcattaaatcatcaaacatgaaagagggagaagaagagaaactaacttttttgttgttgtaaaaacactgggaagga

SEQ ID NO: 5524 - DNA, 434 bp, Lilium asiatic
  Clone ID: LIB3230-042-P1-K1-F1
cggacgcgtgggataagattacgctagtgatgcagagagaaaatactcttgagttagcataactttccttcttagctgacgaaaatattaaattgcaattctctctaaccattttcaaatccttagatttctcacagtcaaacgtcaaccaaatgtaggagcaacttttctcttaatccaaccacagtgaagtgtgagataaatgtcagcaaacaaataccatgttcctgggaaagtagtcctcaacagaaaggaagaacaataagaccttttttcgtttagagaaattaacttttttcattataaaatagataaaatgttaggaaaaagaaatggggggaagaagacattataatggaaagtcaaacccttataattataatataaatatatatataatataataattatataatattattatatattataat

SEQ ID NO: 5525 - DNA, 292 bp, Lilium asiatic
  Clone ID: LIB3230-042-P1-K1-F10
ataataatattttttttttttttttttggggccaaaaaaaacccgaaaaaaaaaagtaaaaaaagaaagtaaaaaaaaaaaaaaaaaccaaaaaccaaccaaaaaacaaagggaaaaaaaaaaaagcccgccaaaacccaaaaaaaaaaaaaggccggccccaaaaaaaaaaaaaaaaaaggggcctgggaccaagccaaaaaaaaacccttcccagaggaaggtataacccaaaaaaaaaaaaagggtgcctaaaccctgcaaaaaaagcgccgaaggagagggccaaaac

SEQ ID NO: 5526 - DNA, 405 bp, Lilium asiatic
  Clone ID: LIB3230-042-P1-K1-F11
ctcggttcgaggtgtggcaagccaatgtgcatgcacatgttcatgattgcttaatggagcatccttggtaactaattatgctttgatcgttgtagcatgcccgatggtatggactactcacatgttggacgggtattcaaacagatggaatgctatacgtcattgcgttggtccgggtacaaggatcatttcatgagagggttgggtcatggtgtgcgtaaggacctgcacatgatgtgcatcatggacgtcgcataagggtcgggaggacgaaaaatattcgagattcgttggtcccgtgatagttggtttcagagccctaacaatacgtgaagcgtcaagactaggattgtcacttcaatgttctgataggttttaatgattgagcgttagccattaggttca

SEQ ID NO: 5527 - DNA, 233 bp, Lilium asiatic
  Clone ID: LIB3230-042-P1-K1-F12
gtccgacctaggtgtggaatttcaattttaaggcacaagttcaaaatggcttaaaggaaaattcctgagaactagaaatacacacatagaccaacaaagaccattggtagggactacaaaaaacttagacaccaaatgcaaacagaaccccagcgaatacgcttacccgtaaagcggggatcaagcaccatcacatgagatttgttactaatagcaggacgtaaggacaatca

SEQ ID NO: 5528 - DNA, 374 bp, Lilium asiatic
  Clone ID: LIB3230-042-P1-K1-F2
ggacgcgtgggataagattacgctttttgttttagagaaaatactcttgagtgagcataactttccttcttagctgacgaaaatattaaattgcaattctctctaaccattttcaaatccttagatttctcacagtcaaacgtcaaccaaatgtatgagcaacttttctcttaatccatccacagtgaagtgtgagataaatgtcagcaaacaaaaaccatgttcctgggaaagtagtccttaacagaaaggaagaacaataagacctttttcggtttagagaaattacttttttcatttctaaatagataaattgtttagaaaagaatgtggttgagacatatttgaagtcaaactttatatatatatatata

SEQ ID NO: 5529 - DNA, 401 bp, Lilium asiatic
  unsure (1)..(401): unsure at all n locations
  Clone ID: LIB3230-042-P1-K1-F3
gaaaccctagctccgccgccggatccctaacagccatgcctttcaagaggtacgtcgagatcgggagggtcgcccttgtgaactatgggaaggattacggcaggctcgtcgtcatcgtcgacgttctcgatcaaaatcgggctttggtcgatgcccctgacatggtaagagggcaaatgaatttcaagaggctctccctcactgacattaaaatcgacatccctcgaatccccaaaaagaagtctctgattgctgcaatggaagctgcagatgtcaagaacaagtgggagaacagctcatggggaaggaagttgattgtccagaagaggcgagcttctttgaatgactntgaccggttcaaggtcatgttggcaaggatcaagagaggtgtgctatcaggc

SEQ ID NO: 5530 - DNA, 356 bp, Lilium asiatic
  Clone ID: LIB3230-042-P1-K1-F4
ggctcttgagagtgtgctgccgacgatttctgcatcacagctgactgatatcgagttggatgaatgtgaggagacaactatgcatgatgtcaacattgaggatgagatgaggaggaagcagtcccaggctcaagaggcttatgatgaagatgaggacatgccgggaggggctcaaagggtgcagcgtgctcagcagtaaggagatgatgatgatagctggatgtttaggatctgaatatgctgccaggtaacttttatccactctatatttttataggatatcataattgacaccttgttcagtcaggacagatctgaacttgaaacgtcttgcttaagactatcctgggtccata

SEQ ID NO: 5531 - DNA, 409 bp, Lilium asiatic
  Clone ID: LIB3230-042-P1-K1-F5
cccgagaacgcagttgagctgtatgcttagaaggtgaacaaccgtgggctctgtgccgtggctcaagctgagtctctccgttacaagctccttggtggccttgctgtcaggagggcttgttatggtgtccttaggttcattatggaaaatggagctaaaggttgtgaggtcatagtcagtgggaagctcagggcccagcgtgccaagtccatgaagtttaaggatggctacatgatttcttctggtcagcctgttaatgaatacattgatgcagctgtaagacatgtattgctgcgacagggtgttcttggcatcaaggtgaagatcatgcttgattgggatcccaagggtaaatctggcccaactaccccattacctgatcttgttaccattcacacccctaaagagg

SEQ ID NO: 5532 - DNA, 402 bp, Lilium asiatic
  Clone ID: LIB3230-042-P1-K1-F6
cccgagaacgcagttgagctggatgcttataattttaacaaccgagggctctgtgccgtggctcaagctgagtcgctccgttacaagctccttggtggccttgctgtcaggagggcttgttatggtgtccttaggttcattatggaaaatggagctaaaggttgtgaggtcatagtcagtgggaagctcagggcccactgtgccaagtccatgaagcttaaggatggctacatgatttattttggtcagcctgttaatgaatacattgatgcagctgtaaaacatgtatagctgcgacagggtgttcttggcattaatgcgaaaatcatgctcgtttgggatccacatgggtaaatctgtgccaactaccccattacctgatcttggtaccattcacacccc

SEQ ID NO: 5533 - DNA, 244 bp, Lilium asiatic
  Clone ID: LIB3230-042-P1-K1-F7
ggcacacgcgggcttgctctttggcttttaagaccaaggccaagaatgacaagtggtgcaattccctggttttgaaaatactccagatacagagatcaagaaaaacttgtgataacaacctaacaattcaaccgtatccatttatgtcctttgtccacaccagttacttgattaactgagtttcaaatcagtactgcctttatcatctcatttgtaaatttatggatgccgaatagatcttcct

SEQ ID NO: 5534 - DNA, 360 bp, Lilium asiatic
  Clone ID: LIB3230-042-P1-K1-F9
ggcacacgctctgttgctgtaaggtctttaggatcgacgccaagatgaacgagtcatgcagcttcttggtttggggaatactctgctacagagcttaagaaaaactgcgggtaaagacctggcaattcaacgctatccagctatttccttgtctaccaacagtggcttgattggctgggttccaaatcgtgacacccttcatcatctgattcgagattatagggatgccagaaagatcttcctaaatcaagaacataagtggatgctagcttttgcaccagactatgaccaccggccacttatagcgaatgttgaagcatttgagcaagctctgcactacactgatgacaatgacttggc

SEQ ID NO: 5535 - DNA, 345 bp, Lilium asiatic
  Clone ID: LIB3230-042-P1-K1-G1
gtaaaaatgtttttggagaaggagtttaccctgatgtggatatgaccaacatatactacgggggcacgagtattgctggttcgaggatagttttcaccaacggctcacaagacccctggcgccatgcatctaagcaaacatcctcttcagaaatgccatcctacatcgtcaaatgccataattgcgggcatggtaccgatctaagaggatgtccccagactcctttaaacattgaaggcaatgcgagtaactgtacttccccagaagcagtgcagaaagtgagagagaagatcatcgaacacattgacttatggctctcagaatgcaaaagcccccggtatgcga

SEQ ID NO: 5536 - DNA, 259 bp, Lilium asiatic
  Clone ID: LIB3230-042-P1-K1-G11
gagaaaactggctaacagtctgcctactgcatagcgcttgatcgcaaaaacatcagcaccataaagcactactccaacttctctcaagaagcggcagcaaccctatatggatgaccatgcgagctcaggtccgcgaaagaagagacagatggtgtggcctctcgagcgtgggtcaactgtagaaaagatcgatcagagatccgatgcttttgtgccctgacaagctttactggtacctgtcatgtaaggcatgttattg

SEQ ID NO: 5537 - DNA, 52 bp, Lilium asiatic
  Clone ID: LIB3230-042-P1-K1-G12
ggaaaaacatgctaacaattttactttttcatagcgatccatcgcaaaaaca

SEQ ID NO: 5538 - DNA, 311 bp, Lilium asiatic
  Clone ID: LIB3230-042-P1-K1-G2
agaacgtcctcaggtttcgaaggaatagcacgtatacaaataaaaaaaagaatcgatttgatccaagtcataatccatattggattccctaatttattaatagagggccgaacacgaggaatcgaagaattacagatgaatgtacaaaaggagtttcattctgtgaaccgtagactcaacattgctataacaagagttgaaaaaccttatggacaacctaatattcttgcggaatatatagctttacaattaaaaaatagagtttcatttcgaaaagcaatgaaaaaagctattgaattaactgaacaaac

SEQ ID NO: 5539 - DNA, 149 bp, Lilium asiatic
  Clone ID: LIB3230-042-P1-K1-G3
agaacgacctcagggaacgaaggaatttcacgtttacaaataaaacaaagaaagggtacgagccaaggcagaagggataggggaccccctaattcaaccaaagagggccgaacacgaggaatcgaagaatcacagaagactggccaaaa

SEQ ID NO: 5540 - DNA, 51 bp, Lilium asiatic
  Clone ID: LIB3230-042-P1-K1-G4
tattacttcctcaggtttcaaagaaatttttctttttctaataaaaccaac

SEQ ID NO: 5541 - DNA, 458 bp, Lilium asiatic
  Clone ID: LIB3230-042-P1-K1-G5
gcttccacgcaccgggccgcagttccgggatcgacgccacgcgcccggccggcgtggaggacatcagggtggtggcagcagttatggtggatattctggtcgttctggaagctctgggttatctggttcgaaccctgtttcccatggaaaacattatggttactaggatccccagtgattagggacagcagctgagatctttcaagtccggagcccagcctatgtgaagcctgaagcctaaaactgtagacatgatgaactggatccaagttttatatggcccaccttggaagcttaggaggagaccagcatgcaataatattatgtttttcctatgagcctttagcctttattcgtgccgaacattttttcagtatcccgagggcctgtcttccaagcccaaacatattttcagatgcttttgtattcagttggtattaaaaccgtgtatttttggg

SEQ ID NO: 5542 - DNA, 393 bp, Lilium asiatic
  Clone ID: LIB3230-042-P1-K1-G8
gttgtacttatcttgctcgttgtagtttgtgctgaagtatctgtggtcttgacctacatgcatctctgtgtggaggactggaggtggtggtggaaagctttctttgcatctggttcggttgctctgtacgttttcctgtactccatcaattacttggtgtttgaccttaagagcttgagtgggcctgtttctgctacgctctacctcgggtattcgctcataatggcatttgcgattatgttgtctaccggcaccattggctttctgatatcattctactttgttcacttccctcttctcgtccgtgaagatcgattaggaggttgccttcttgagattcaacagtagtttgctttcaattaagatcccttgattgggttacaatgttatcta

SEQ ID NO: 5543 - DNA, 171 bp, Lilium asiatic
  Clone ID: LIB3230-042-P1-K1-G9
actgtgctcactggacaggcgtacgatcgtatgggcagactaagacagagcgcaatcaacgatgtatcttgcacgggacccaatgccacaaacatgcgagttgctgcatatagagatggcagctctgtgagacccacaattgtgcagcgataggacaggggatatatagtg

SEQ ID NO: 5544 - DNA, 126 bp, Lilium asiatic
  unsure (1)..(126): unsure at all n locations
  Clone ID: LIB3230-042-P1-K1-H10
ggaaccggatccaaggcctataagtttccggagccgcaagacagcaaaggaaggccgaagacagggcncgcacaccaaagcgcagcaccaaacaccaacggaaggacagccgctacctaagaaggg

SEQ ID NO: 5545 - DNA, 267 bp, Lilium asiatic
  Clone ID: LIB3230-042-P1-K1-H5
gacgggacaaggtgctttctaactgtatcgtgctcatggctgttagaacatataccaatgtctccctagccagatagttcttcggacttcaaggccgtctacaacctgtctgccgcagttcatcaatccaagttttctgttactaccgactggcagagtgattaaaaccaaccatatgtctgtgtgtgctataatgtatcgatcactatagatcctaaacagtcatgacacgtacctacacatgcgttagttgaccctgtgtcacct

SEQ ID NO: 5546 - DNA, 411 bp, Lilium asiatic
  Clone ID: LIB3230-042-P1-K1-H6
ggagaccggatccaaggccaagaagggcgccggtggccgcaagggcagcggctcaagggcgaagtcggtgactcgctcagtcaaggcggggctccagttccccgtcggaaggatcggccgctacctcaagaagggccgctatgcccagcgcgtcggatctggagctccggtctacctcgctgccgtgctggagtatctcgctgctgaggttttggaattggctggaaatgcagcccgggacaacaagaagaaccggattgttcctcgacatgtgtgtctggcggtgaggaatgatgaggagcttgggaggttgttgggtggggttactattgctcatggtggagttttacccagcatcaaccctgtccttctgccgaagaagactgggaaggagggggtggagcccaagag

SEQ ID NO: 5547 - DNA, 290 bp, Lilium asiatic
  Clone ID: LIB3230-042-P1-K1-H9
ggattatgctacctagctgatatgtcatgatgatccgcgccaagatgaacgaggcgtgcatctttttggtttggggaatactctactacatagctcatgaaaaactgcagatatagacctttcaatacaactttatgcagttattcccttgtctcccaacagtggcttgattggctttgatccaaattgtgacaccctttatcatctcactcgagaatatatggttgccagaaagatctttctaaaccaagagtataggtgtatgctaacttttgcaccatactatttcc

SEQ ID NO: 5548 - DNA, 322 bp, Lilium asiatic
  Clone ID: LIB3230-043-P1-K1-A11
cagaaatctggcaagtatgcatacaagctggtgtactgcccaagtgacgagaatacctgcagcgatttaggcatttactacgacaaggaggtaaagaagaggtggctcgctttgagcgactcgccattggaggttatgttcatcaaaccttgatcgtcactgctctacttcaaccctgcctgaactgtttgagcttggcttttgtgttaccttgtatgcatcccttctatgtatgaataaagtggatgggaatctttgtagccaaaataatatatgtatgaataaactgggtggggatcgttccattatcgttgacatggca

SEQ ID NO: 5549 - DNA, 425 bp, Lilium asiatic
  Clone ID: LIB3230-043-P1-K1-A3
cccacgcgtccgcaaatcaagaaaaaattgatgaaataaatccaaatagaatgaactttatttccactataaaaaagtgggtttcaaatactaatattagtaataaaaatttaaatagttatacttgcttgtcccaagcatatgtattttacaaattatcacaaacccaattacttaacaagtataacttgaaatatatatttcaagatcatgaaacccattattatcttagggatgaaataaaggattattgtataacacgaggactatttgattacaaatcaaggcataataaaattaaaaagtctggaatgaataactggaaaaactggttaaagggtttttatcaatacaatttttcccggatcaaatggtctcgattagtcccgaaaaaatggcgaaatagagtcaatcaacttcgtatg

SEQ ID NO: 5550 - DNA, 410 bp, Lilium asiatic
  Clone ID: LIB3230-043-P1-K1-A6
atgggcgatggtttgatgatacaagagggaagttctgtaaaagcaacaggaagaattgctcagatacctgtgagtgaggcttatttaggtcgtgttataaatgctctggctaaacctattgatgggagaggtgaaatttcagcttctgaatctcggttaattgaatctcctgccccaggtattatttcgagacgttccgtatatgagcctcttcaaacagggcttattgccattgatgcgatgatccctataggacgtggtcagcgagaattaattattggggacagacagaccgtcaaaacagcagtagccacagatacgattctcaatcaaaaagggaaaaatgtaatatgtgtttatgtagcgattggtcaaaaagcatcttctgtggctcaagtagtgactacttt

SEQ ID NO: 5551 - DNA, 85 bp, Lilium asiatic
  unsure (1)..(85): unsure at all n locations
  Clone ID: LIB3230-043-P1-K1-A7
acgcagggccgcnctagaggatccaagccnacgaacgcgngcangcgacgccatagctcaacaatagagacacctaaattcaatt

SEQ ID NO: 5552 - DNA, 416 bp, Lilium asiatic
  Clone ID: LIB3230-043-P1-K1-A8
accatggtaacctccagaagcgtcttgggatcacagcggggctctgcatcctgatccagcatgtccctgaaaagggtggggaccgatacgaggccatctacagtttctattttggggactacggccacatatcggtgcaggggccatacctcacctacgaggaatcatacctcgcggtgaccggcggttctggcgtcttcgagggtgtttacggccatgtcaagctgcaacagctagtctttcccttcaagctgttctacaccttctacctcaagggcattcccgacctcccgccggagctgctaggcgaccacattcctccctcctcagcagtcgagcccattcccgctgccaagtcctgtgagccccatgccgcgctaaagaatttcacagattgatgattatagatggtcttt

SEQ ID NO: 5553 - DNA, 413 bp, Lilium asiatic
  Clone ID: LIB3230-043-P1-K1-B12
cggacgcgtgggcggacgcgtggggtcttggtgataaaaaaccaaatgagtgtcaagtgcagcatagaaaatttctatgagaaaaagaactcttttgaaaaagccaggtgattgacatattggtccaacaaaaatgggaaaacacgttagaaggtaagaaaccaaaagggggaggatgtagtgaagtggaaaaggtacaattgatttatacattagagagaaccaatagtttatattgagttacctaatcaagcgctttatttgcaggaggaggagatatctattgcagattccatcaaagaagaagaatcaatttttgctgtcaaaagaaggagcaacactacagtcacgcttgatagtctccaggaagagcaccccaataagaaagtgaagaaagctaatgagaagagtgt

SEQ ID NO: 5554 - DNA, 366 bp, Lilium asiatic
  Clone ID: LIB3230-043-P1-K1-B3
gatgttggaaccggggcagggctttttgaggtgaagaaattcgcggatgagtttttctcattcatcgttgactgcaaagatccaaaagcctgtactgtacttttaagaggcgctagtaaggatcttttgaatgaagttgaaagaaatttacaggatgctatgtctgtagcaaggaatatactgaagaacccaaagcttcttccaggtggcggtgctacagagttgaccgtttccgcaacactaaaacagaagagttcttctattgaaagcattgagaagtggccctatgaagccgctgccttagcttttgaggccataccaagaactctggctcaaaattgtggcgtgaatgtgatccgaacaatg

SEQ ID NO: 5555 - DNA, 412 bp, Lilium asiatic
  Clone ID: LIB3230-043-P1-K1-B4
cggacgcgtgggcggacgcgtgggcggacgcgtggggagaaattcatctccaacccctccgctgcgatgacgaccgttcccggctctctgatctgggagcttgtgaagaacaacaacgcgttcctggtgaagcagttcgggaatggcaacgccaaggtgcagtttagcaaggagagcaacaatctctataacgttcactccttcaagcactccgggcttgcgaataagaagacggtttcgatccagcctggggggaaggatctgtctgttgttcttgctacaaccaaaactaagaagcagaacaagcctgcagcgctgtatcacaggtcggtcatgaagaaggagttcagcaagatggcaaaggctgtcaagaatcaggtagcggacaactactataggcctgatctgacca

SEQ ID NO: 5556 - DNA, 413 bp, Lilium asiatic
  Clone ID: LIB3230-043-P1-K1-B5
ttcttgttcagtcatcgactcctcttttttgcgtcaatcgaagcaccgtcatgataacgagcaattcaatattcccagagtgcattaagcacattgagatctcactacattcgctagtcgccacagctcaagatattgtaacttcgctctctctgccatcacttagaccacaaacttctccacccaagctcacctgacgcacgagttctagtttcttgtgagcaaactcatgttgtgtggcccaccttgagtttgtggggacgtgttaatgtaaatgtagaactctaggtgtagtagtagtgttagcatagccgaggagatatttatgtggtgtatatagaaatggtgtgtgcagataacatttgttttcgtataaataccccattgtcggccatgagaaacacaaccacaca

SEQ ID NO: 5557 - DNA, 362 bp, Lilium asiatic
  Clone ID: LIB3230-043-P1-K1-B6
ttcttgttcagtcatcgactcctcttttttgcgtcaatcgaagcaccgtcatgataacgagcaattcaatattaccagagtgcattaagctcattgagatctcactacattcgctagtcgccacagctcaagatattgtaacttcgctctctctgccatcacttagaccacaatcttcttcacccaagctcacctgacgcacgagttctagtttcttgtgagcaaactcatgttgtgtggtccaccttgagtttgtggggacgtgttaatgcaaatgtataactttaggtgtagctttagtgttagtataactgtggagacatttatgtggtgtatataaaaatggtgtgagcagataacat

SEQ ID NO: 5558 - DNA, 419 bp, Lilium asiatic
  Clone ID: LIB3230-043-P1-K1-B7
caagatcctggttggaaacaaggccgatatggacgagagcaagagggctgtgtcaacgtcacagggacaggcgctagccgatgaatacggcatcaaattctttgaaactagtgcgaagacgaacttcaatgttgagcaagtgttcttctccattgcgagggacataaagcagaggttggccgaaagcgacgccaaacctgaggcaccgacggtcgatatcaaggttgcgggcggggcaccccctgctgcaccgaaatccggttgctgtggttcatcatgatgaaaagaatggcttggggacttcttacagagaagttgaagctgttttggtcagcattgatgttttcatcatctttttggtttacttggatatccatttatcttttgtgtctctttataatgctgagttagattcttac

SEQ ID NO: 5559 - DNA, 413 bp, Lilium asiatic
  Clone ID: LIB3230-043-P1-K1-C10
cagcatccctaagcagtgtcctcctccagatccgcaatttctctgcacgttctctctagctttctcgaccgctcacgcgttgggtccattcgtgattgctgaagtaaggatcaagtatccgatcccagctccgaaggtcactagcagcctacatggtgtgatcctccagaagatcaacccaaaggagctccagaaacatgcaactgttaggccctctgtattacatatgctcttggaggtcactaaattctgtgatgtttatctcatggtgagaattcttgatgacgaaagtgaggtcactagcagcctacatggtgtgatcctccagaagatcaacccagaggagctccagaaacatgcaactgttaggccctctgtattacatatgctcttggaggtcactaaattctgtg

SEQ ID NO: 5560 - DNA, 419 bp, Lilium asiatic
  Clone ID: LIB3230-043-P1-K1-C2
ctccttcgacctcgtcgccatggctcgccgctccggtggaggaagatctgcccctcgccctgctgcccgggccccagcgaggaacccccctcagccagttcgtcaggcaccaccaccagctactgctcaggcaggcggatcttcgatgctcggggggcttggtgcgaccatcgcacaaggtatggcttttggtaccggaagtgctgttgcgcacagggccgtcgatgctattgtgggccctcgcacaattcagcatgagaatgctgctgcttcagaacctactgctactactgctggaggcgatgcatgcaacatccatacaaaggccttccaagattgcatcaacagcaatgggagcgacattggcaggtgtcagttctatttggatatgctgactgaatgccgccgtggttctacat

SEQ ID NO: 5561 - DNA, 414 bp, Lilium asiatic
  Clone ID: LIB3230-043-P1-K1-C5
atctccccaccaagaggctgagccgattgacattagctacgtttgcaaaactctctaagtgatagctcagttaatttcgtcataataatataatgcccttttaaatgtttgtatctttctcttttttcttttacctcccgtttctctgaatgttgttgtactacaatgtaatcctattttttaatttctaataaagtttaatcttttgatgataaacaatttgatggcggttgcagtactggttggcataggaagtttaaagagtaggagggctctctctgtactcacatatatgggggtgacatttcaatctttcacacattaggatgcagacacttaagggttcaaaaaatgtagatggagttgttcaagagattgttggtagcaggtccaaaacaagaacccaataaatgc

SEQ ID NO: 5562 - DNA, 418 bp, Lilium asiatic
  Clone ID: LIB3230-043-P1-K1-C7
gagattaccaaggatgatgtgaaggtttatgcggcagtgtctttgcccggtgaggggttctctaatgtttctcgttggtatgagaccgtctcttcagctcttgcagtgaggtttcctggcaaggctgctggagtgaatattggtggacaagttccaccgtcggaacctgcaccttcgtctgagtctacaaaggtggtggccgaagaagatgatgatgatttggatctctttggtgatgagactgaggaggagaagaaggcagctgaggagagggaggctgctgtcaaagcatcctctaaaaagaaagagagtggcaagtcctctgtcctattggaggtgaagccatgggatgatgagactgacatgaagaagttggaagcagcagtccgcagcattgaaatgcctggtctcttatggg

SEQ ID NO: 5563 - DNA, 313 bp, Lilium asiatic
  Clone ID: LIB3230-043-P1-K1-C9
cggacgcgtgggcggacgcgtgggtttgccccaaagcacaagtccaatgcctatgatcgcacggagaacggttaattattgattttattgatttcttctttcagctcttgtcggaggtaatgatctgtctcccctaagaggttattttttatatgggaagtattatcggagaacttggcaccagtgctaccatacctcctctgaattgcgtataaaattaagaatccctggaatttgatagaccttgagattattttcatgacaatttgacgaggagaaaacttcccgcccttgttatttgcttgcaacttat

SEQ ID NO: 5564 - DNA, 415 bp, Lilium asiatic
  Clone ID: LIB3230-043-P1-K1-D4
cattctccgatcaccgccgccggcgacgacaatgacggcgccggcgaggatcactggaactctagctctgttcgacgtcgacggcactctcacggcgccgagaaagttgataactccagtgatgcttgagttcatgcggaggttgcggcaggttgttactgtggggatagttggaggttcggatctgatcaagatctcggagcagatcgggagttctgtcatcaatgactatgactatgtattctctgagaatggtcttgtggcttacaaaaatggggagctgctcggtacccagagtttgaaatcattcctcggcgaagaaaatctcaaggaattcatcaattttactcttcgttatattgccgacttggatatcccaataaaaagggggacgttcatcgaattccggagtgga

SEQ ID NO: 5565 - DNA, 416 bp, Lilium asiatic
  Clone ID: LIB3230-043-P1-K1-D6
caccaatggcgacagctgttctcatctccccctcctgcctctctctcctctgcaacccaaaacccctcccacactgcaccactatcagcctccacccccgctctcaggccgccagacccctcgccttctcgtccaacttctcagtttctgcgccgttccttaccggcggtggtttgggatggtcggtggagaagaggactgtgaggcggtcggtggtgtgtgaggcggctccggtgaagaaggcggactctgctgcgaagagagcgcggcaggcggagaagcggcgggtgtataataagtcgaggaagtcagagatcaagacccggatgaggaaggtcctcgaagaattggatgtgctgagaaagaagaccgaagcgcaagccgaagaaatactttctatagagaaactgattgcg

SEQ ID NO: 5566 - DNA, 417 bp, Lilium asiatic
  Clone ID: LIB3230-043-P1-K1-D7
ggaaaaattgggaagaggtcttcaaagaaatatttgctgatcatgtggagttttgtggccaacaatagggagttcttaagtcttcgaaacttcttgtttatgtaactggaaccaaagtttgggactgtaaaaggatgatcttacgtgtaattagactgcaattacgataatacaactaattttacaaaggcttggaaattctcaaactatataccatgggactacttttgacctttctacattgattccaatgaaagacaatcaagttggccacctcttgactgaaattgctaaatctattgtttgatattgtacttggaatgtctagaacgcccaaaacatgagtgtatggaatgcaacatggagaggccctcagtggaagctagtaagcctacagctgtgttaggagtttatatg

SEQ ID NO: 5567 - DNA, 415 bp, Lilium asiatic
  Clone ID: LIB3230-043-P1-K1-D9
cggacgcgtggggagaaactccagcaggagcacaccaaaactgtacatatcagccttctgagacaccttcctgatgtcggtgacctctggcatacggtagccagcaatgtgagtgggggtggatgacaggcctacaagataggcaagaccatggtctgacacacgggcttcatatgacttcgccaggaggatgttggaggatttgaagttgccatgagaggctgaaggtccagttgagtggatgtatctgaggcccttcacagcagcaagagctatgctagatcttgtctcccagtagagtgggtcctgccggctcctctgttacctgctcggattaatgttcaagagaggtcaattgttgcataaggaaatgcttcttataggaagaggaggaacaaagccaataatttcacaa

SEQ ID NO: 5568 - DNA, 322 bp, Lilium asiatic
  Clone ID: LIB3230-043-P1-K1-E1
gttgaaggcatcatcatcatcagcagcttgaatgatgctagatggattcaagtcactggtttaattattctttaaatctttcagtacttgttcaggatttgtgtttggtgaatgatttgttggtcactgggaatgaaactgtggggtgaatagggtgctttgtcttggcttttaaattaagttgtggattgctcaacttgatgaggaattaatttcttgtttcaatcagtttctagctagaattctctttttcttcctggaatgatatatattttgtattttggtgtctctgattaatgaaaagaattcatctgagtaaagt

SEQ ID NO: 5569 - DNA, 413 bp, Lilium asiatic
  Clone ID: LIB3230-043-P1-K1-E11
aatggatcaaagcatgcatggaggccatggcgcctgttaatgaggagaaatatgaaaccaaccttgatacccatgggatcagcggagggcctcgactaggaaggctaagaatcgctaataagcaacccaagctcttcaacggattcagattctatttcattggagactcccagccttcgtacaagggatttgtgcacgatctagtcattgctgcatgaggaactgttcttcatcgtaagccgatatcgagagatcaagagaagttacttgatgaacctttggtctctgtgacctttataatctatcgccttgatgtccctgagaaccagaggcctagcaaagaagtgatgactgtcgattacaggtatgctgaagctcagtatctcgcagattgttgcggcgcaaaagtggca

SEQ ID NO: 5570 - DNA, 312 bp, Lilium asiatic
  Clone ID: LIB3230-043-P1-K1-E12
aaatccagtaacagggtgctttagttgctacaaagggcgaggtgggaaagtaagctgataactgatcaaacaggagatattcctcttgtctactttgtattgcaaattggccacttgcacggaagaagagctctaaagttgcaacatatgaggttagacacttaaattgccggagaggaatgcccgtgttttgtgtttgggatgtgatctgctgaccatgacaaatgcagacagtttggtcttgccgggggctccctaaattcagacgaaatgcgaaactagagtgaaagcatgtgctgcaaaataggagtt

SEQ ID NO: 5571 - DNA, 365 bp, Lilium asiatic
  Clone ID: LIB3230-043-P1-K1-E2
taaacaagatgaaggtccaggtgcgaccaacaaacactacaaacatacaaaattatacaacttcctcaaaatgaggcgtgtcgcattcttcaagttctcaatttcgcattttattacaactttcacaaggaaaacactctctcagaggtttgatgcagaagcacctttattcttcaatctctctttggctttataaagaatccgatggacttcctcaaaatgaggtgtggtggcattcttcacgttctcgatccactgctgaatcttgacacggggggccaatattctatcacgatctttgccttcgagaagctccaactgggtaatctcacatgcaagactgagatctgcaatagatggctgac

SEQ ID NO: 5572 - DNA, 418 bp, Lilium asiatic
  Clone ID: LIB3230-043-P1-K1-E3
aatcatcaggtccgactatatgatatttctgcccaaagacgtcctgttatatcaatcagtttccgagagtctccaatcaaggctgtcactgccgatccagatggctatacagtttatattgggaccgggtatggagacattgcctcctttgacatgcgaacaggaaaattgttggggtgctttctgggcaagtgttctggaagtgtcagatccattgctaggcatccagaactacctctgatagcctcgtgtggactggacagatatgtgcgattctgggatacaaaaacaagacaacttctttcggcggtcttcctcaagcagcatctcactaatgtaatgattgattcacatttctccgccgaagaagtttcagtagcttgtgatagaccggacaatctgcaggatcataccaaag

SEQ ID NO: 5573 - DNA, 418 bp, Lilium asiatic
  Clone ID: LIB3230-043-P1-K1-E4
gcgagtagcagtggcaaggagagcaatgtaaagcctccagagcctcagaaagattacatccatgtcagggcgagacgaggccaagctactgataaccacagtcttgctgagagggtgcgaagggagaagatcagtgtgcggatgaagttgctccaggatctcgtgcccggttgtaacaaggtgacaggcaaggcgcttatgctcgacgagatcataaattatgtgcagtcgttgcagcgacaagtcgagttcctttctatgaaattggcgactgtgaacccgcggctagatttcaatgtggagagtatcctaccaaaagatatgcatctgggtaatgggttgatgccgccgcattctggtaatccaatggaggcatcagaggccggttttcagtatactcacccacctcaaattacca

SEQ ID NO: 5574 - DNA, 419 bp, Lilium asiatic
  Clone ID: LIB3230-043-P1-K1-E7
aagcgtgcgaagtgcggccgagatcgagcatgaagagaagcggagcgtgctgatgtggatgcatgcgtgtgaagcagaagatcaaggcccagatgcagcgagtatgtgtgtgcgaagatggaaccatgcagagcacagcccctgatcaagcatgcagaagaatccgacggctatgatgaagcttggtgcctataagaaggtgcagatcgtcgaagaagggccggcccggccccgaaggttcatttcggttctttctccccctttgcatgttgcctctctatgagagcgtgagaagatctttcttctctaggggagccgagtgaacagaagggcgaggacacctcgcatgcagtgagcattgaggaaccacactggttcgtcctttctcactgaccggggtcgtccaccaagaagatctt

SEQ ID NO: 5575 - DNA, 414 bp, Lilium asiatic
  Clone ID: LIB3230-043-P1-K1-E9
aatgctgcatcatgtgtcaaggcgtcaatcgctgaggagacattattcgaggaacaaatggtgtgggccgccccggactcatatccatgggcgtgttacatgtatcaagtccagagtgaggctctccaatttgttgccctgagacaactaaaggaggagactgattggaagcctatgagggtttccgacgatcgactgcaacagttatcggaaggttcgggagataaaaagtgaagttgtggaaatgagaagagaaacttgtagccgtagatacccctatataaatgaatccatagtttccttgtcagttcgtcgagaaagtaaatatgagagattgtgagtttcaggctgattttgataaagttttctaagaataatgtaatgtatgacaggttgtgtgtataaaaatctgaa

SEQ ID NO: 5576 - DNA, 296 bp, Lilium asiatic
  unsure (1)..(296): unsure at all n locations
  Clone ID: LIB3230-043-P1-K1-F10
aaacaaaaaaaanagaaaaaaaaaaaaaaaaaaaaaaaaaaaaaaaaaaaaaaaaaaaaagaagaaaaaaaaaaaaaaaaaaaaaaaaaaaaaaaaaaaaaaaaaaaaaaaaaaaaaaaaaaaaaacaaaaaaaaaaaaaaaaaaaaaaaaaaaaaaaaaaaaaaaaaaaaaaaaaaaaaaaagaaaaaaaaaaaaaaaaaaaaaaaaaaaaaaaaaaaaaaaaaaaaaaagaaaaaaaaaaaaaaaaaaaaaaaaaaaaaaaaaaaaaaagaaaaaaaaaaaaaaaagaaaaaaa

SEQ ID NO: 5577 - DNA, 416 bp, Lilium asiatic
  Clone ID: LIB3230-043-P1-K1-F11
ctcattgctttccttttggaaattaaatctcgagcttacatttgtctcccccctgcaggaattgcatgaaggacggtggagatttcacgcatgcgagcaaaagctatcaagcaaggaaggaaacgatcatgcacggagggccgagatctgaagaagatgctggatggctctgatgaggtgaaggtacgatgtgcagttctgatctgacggcgaagaggaaggccgtgcatggagcttctagaggcgcatgtggaaggagctctccattggacgcgcatgtgaagtgctcgaagcagaagacggtgccgggccgaagtcgaagtctataaaagcacctagccgatcgacgatttctctcaagtctcagacgaagaagatctctcattctctgagcctccttcatccaggaactctgc

SEQ ID NO: 5578 - DNA, 415 bp, Lilium asiatic
  Clone ID: LIB3230-043-P1-K1-F12
cggacgcgtgggattgagcttcagccacatcttaaccatgtatcagctgtagagccaactcttgctcctgtctctgtcgaacgaacaatgactactagagctgctgcttcaaatgcacttcgtcaacagaggcttgtccgtgaagttacagtccagtacaatctttgcaatgagccatggcagaaatacagtctcagcatagttgctgacaaggggctaaagaagcctcttcataccgcagcaaggctgaagaagggagaagttctatatttagaaactcatcgtcgtcggtatgaactctgtttcagtggagagagaacaatatgtaacggatcattgccgacatctgctcaatcacatgaattagatcaaaagcttcaaaatcagtgctcaattgcaacaaatggtgagagac

SEQ ID NO: 5579 - DNA, 417 bp, Lilium asiatic
  Clone ID: LIB3230-043-P1-K1-F2
gaaaaattactacattagctccattgctggcgccaacaatggaagctcacttgttgtgatgtctaaaggtacccagtattctcagcaatcatacaaagttagtgactcgttccccttcaaatggattaacaaaaagtggaaagagggattttatgtcacgtcaatggcaacttctggtaatcgctggggtattgtcatgtcacgaaatgccggctttagtgatcaggtggttgagttggatttcttgtatccaagtgagggcattcacaaacgctgggataatggattccgcattacatcaatggctgccacttgggaccaggctgcgctaattctaagtgtgcctagacgcaagtttggtgacgagacacaggaaaccctcagaacctcggctttcccgagtgcccatgtaaagga

SEQ ID NO: 5580 - DNA, 327 bp, Lilium asiatic
  unsure (1)..(327): unsure at all n locations
  Clone ID: LIB3230-043-P1-K1-F9
aaaaaaaanaaaaaagaagaacaananaaaaaaaaaaaaaagaaaacaaaaacaaaacaaaaaaaaaaaaaaaaaaaaaaaagaaaaagaagaaaaaagaaaaaaaaagaaaaaaaaaaaaaaaaaaaaaaaaaacaaaaaaaaaaaaaaaaaaaaaaagaaagaagaaaaaaaaaaaaaaaaaaaaaaaaaaaaaaaaaaaaaaaaaaaaaaaaaaaaaaaaaaaaaaaaaaaaaaaaaaaaaaaaataaaaagaaaaaaaaaaaaaaaaaaaacaaaaaaaaaaaaaaaaaaaaaaaaagaaaaaaaaaaaaaaaaaaaaaagaa

SEQ ID NO: 5581 - DNA, 203 bp, Lilium asiatic
  Clone ID: LIB3230-043-P1-K1-G1
ctcatcttttctaatgatgtttcttactagtttttttatacaataactacttttattatcatttttattaaccaaacccttcaccaaataatttaccacctcttcagaaaaacacatacacttcttctatgtaatacaaattcacaaatcctacatcataaaacaaatttctcctctaaattctctctaacaaaaaatcctct

SEQ ID NO: 5582 - DNA, 418 bp, Lilium asiatic
  Clone ID: LIB3230-043-P1-K1-G10
tttcctgccaagttcaaggatttcaaaatccagaacatagtcggctcgtgtgatgtcaagttcccaataagactcgagggccttgcttactcccatggcgctttctctagttacgagccagagctcttccccggtctgatctaccgtatgaaacagcccaagatcgtgctcctgattttcgtctcagggaagatcgtccttacgggagccaaggtgagagaggagacgtatctggctttcgagaacatataccccgtcctcacagagttcaggaaaactcagcaatgagagatgggacgctgctgatggttggacctctaactgtgtagaaagaggaacatggagtctgacaaagtaagaaagttgtatcgaattgtaaggtgttgtaggaagttgttgtgagggattttgagagaga

SEQ ID NO: 5583 - DNA, 78 bp, Lilium asiatic
  Clone ID: LIB3230-043-P1-K1-G11
tcgttcactgcttttcttttgcatattaaatctcgagctcacatttgacctgggggggcatatattgcatgaatgact

SEQ ID NO: 5584 - DNA, 415 bp, Lilium asiatic
  Clone ID: LIB3230-043-P1-K1-G12
cggacgcgtgggattgagcttcagcctcttcttaaccatgtatcagctggggaggcaactcttgctcctgtctctgtcgaacgaacaatgactactagagctgctgcttcaaatgcacttcgtcaacagaggcttgtccgtgaagttacagtccagtacaatctttgcaatgagccatggcagaaatacagtctcagcatagttgctgacaaggggctaaagaagcctcttcataccgcagcaaggctgaagaagggagaagttctatattcagaaactcatcgtcgtcggtatgaactctgtttcagtggagagagaacaatatgtaacgtgtcattgccgacatatgctcaatcacatgaattagatcaaaagcttcaaaatcagtgctcaattgcaacaaatgggtagagac

SEQ ID NO: 5585 - DNA, 412 bp, Lilium asiatic
  Clone ID: LIB3230-043-P1-K1-G2
gcctggtcactttgctcgtgaatgccgcatgcgtattggttctggaggacaaggcagtggccgtcgccgtagccgcagccgcagccctcgctatcgaaggagtccaagttatggtcggcggagcccgagccctcgtgaacgttctccaagaactcgcaagagctacagtcgtgaccgctctcccagaagccgcagtgtgtcacctcgcaggcgcagctatagcaagtcacctgctcgaggtcgtgatgaaccagcaaatggtaacggaagttctgctgtcaaagagactcgtcggagcatgagttgaagtaccaatatgcttggttgagacattgtgtgttgatcttagatattggacactgttggctttgatgaactaattattgtgtaagagattttctcagtcaccctg

SEQ ID NO: 5586 - DNA, 272 bp, Lilium asiatic
  Clone ID: LIB3230-043-P1-K1-G4
ctcaaagccattggcggtttatgtatggaagcatgctttctggggtgttgatcaccagtggaatagtaacctttttgcgacggttggggcacaggttgatatatgggatcacagcaggtcagagcctgtgagcagttttgagtggggaaaggatacagttgtttctgtacgatttaatccagccgaaccagatgttctggtaacgtctgctagtgatcgtagcataactctctatgacctacggatgtcatctccagctaggaaactgatta

SEQ ID NO: 5587 - DNA, 422 bp, Lilium asiatic
  Clone ID: LIB3230-043-P1-K1-G5
agaagatatgtcaacagagcttcacatttatacggacttcctcagaattgtgctggaaattctgaatgcaattctttcatatgccttaccccgaaatcctgaggttgtatatgcaatactgcatcgtcaagaagtctttctgccattcaaggatcatccccgatttactgaactgctggaaaatataaatacagttttagatttcttcaatagtcgcatggatatgcagaagaaggatggtgaatggtctgtggacaagctgcttgaaatcatcatcataaattgcagatcatggcgcggtgaagggatgaagatgttcacacagttgcggttcacttatgagcaagagaaccatcctgaagagttctttattccatatgtatggcggctagtcctttctcacagctttgatttcaataccg

SEQ ID NO: 5588 - DNA, 414 bp, Lilium asiatic
  Clone ID: LIB3230-043-P1-K1-G6
gtcaggacgcggcaagggagggaaggggctcggcaagggcggcgccaagcgtcaccgcaaggtgctgcgggacaacatccagggcatcaccaagccggccatccgccgcctggctcgccggggcggagtgaagaggatcagcggcctcatctacgaggagaccagaggggtgctcaagatctttctggagaatgtcatccgcgatgctgtcacttacacagagcatgctaggaggaagacggtgacggcgatggatgtcgtctatgctctcaagcgtcagggccgcaccctctatggattcgggggttgatcttttcctgttcatctgggtctctgtttgtttttgaatttggatggtagtttgggttatgagtgtctggtgtttaatatttctcgtatgaaatgaaattgacc

SEQ ID NO: 5589 - DNA, 412 bp, Lilium asiatic
  Clone ID: LIB3230-043-P1-K1-G7
cactttcatcaacaagtctccaccacacattcctgaagtgagcatcccggaagatctaactgtccagattgccctttctctgcgatactatatcaatcgtgggtttgctcttcttagggaggttgcctccggtcgcgatctgaagaaattccttgcagtcattgcaggcttgtggttgctctcaatcattggaagctgctgcaatttcttgaccttgttctacatagcatttgtgtcgctgcactctattcccctactgtatgagaagtatgaggatcaagtggactcttttgcggagaaggcaacagccgagttcaagaagcattatgcagtgatccatgccaagtatataagcaaaattccggtggcatcttacaagggaaagaagctgctttagagaatgaaaaatact

SEQ ID NO: 5590 - DNA, 178 bp, Lilium asiatic
  unsure (1)..(178): unsure at all n locations
  Clone ID: LIB3230-043-P1-K1-G8
gaaaaacacaacaccagccccacagctggcgccaacaacggaagcacacggagggggaaggcgaaaggaacccagcaaacncagcaaccacacaaagaaagggacacgcaccaccccaaagggaacaacaaaaagnggaaagagggacccaaggacacgccaacggcaacagcaggaa

SEQ ID NO: 5591 - DNA, 411 bp, Lilium asiatic
  Clone ID: LIB3230-043-P1-K1-H1
gaggatttcaaggaggagcagaactctgttgctcgtctcgtgcacatgttgtacaatgatgatcctgaggagatgttgaagattataactactgtgaggaagcatattcttcttggaggtcctacgcgcctccctttcaccatacctccccttgtattttctgccctcaagttggtaagacgattaccaagtcaggatgcagaagtagctggcaatgaggtttctgcaacaccaaagaatatttttcagatattgcatcagactattgagatattatcttcggtttcttcaccagaacttgccctaagattgtacttgcaatgtgcagaggctgccaatgattgtgatctcgaacctgtctcatatgaatttttcacgcaagcatttatattgtatgaagaagaagttgca

SEQ ID NO: 5592 - DNA, 420 bp, Lilium asiatic
  Clone ID: LIB3230-043-P1-K1-H4
gagaattcagtttgtctaattacagtgacttgtgcgacaataaagttgggttatttccgctcgatgggatcagggaagggttaccctcatgcttctagccgtctgttagtagattattcctcgtcatatgattcagtgcttcgtcaatgcgacgaagggttttctctggccgccgaagctgatacaaatacaggtggaagagttattgtcttagcagctctcagagaggaaggtggtactgatctaggatcctggatgtatatggcaacacattcaattcctcttcctggtctgaatttgacacatcttcgttgatgtaaaagtcatttacggttgcacgaattactagaatttttgttttcatattccacgaaatgtaaatggtagtgaaagtatacttttatgttttggtgatcagta

SEQ ID NO: 5593 - DNA, 413 bp, Lilium asiatic
  Clone ID: LIB3230-043-P1-K1-H7
cgttccggggccccttggccggcaaggaagttactgcccctggacaggaaaaattctggccggatcttcgaggccaagggccttctccgcctatgaatcggtaccggctcctcggggggggacagaacaagctcgattacgtgcttgcactcaccgttgagaacttccttgagcgccgccttcagactcaggtgttcaaatcgggcatggcgaagtcgatacatcatgctcgtgttttgatccgtcagcgtcacatcagggttggccgtcaggtggtgaacattccctcgttcatggtgagagttgattctgctaagcatattgattttgccctcaacagtccacttggaggaggtggccctggaagagttaagcgaaggaaccttaagaaagcttccactaagaagggagct

SEQ ID NO: 5594 - DNA, 412 bp, Lilium asiatic
  Clone ID: LIB3230-043-P1-K1-H8
gaaaaattactacattagctccattgctggcgccaacaatggaagctcacttgttgtgatgtctaaaggtacccagtattctcagcaatcatacaaagttagtgactcgttccccttcaaatggattaacaaaaagtggaaagagggattttatgtcacgtcaatggcaacttctggtaatcgctggggtattgtcatgtcacgaaatgccggctttagtgatcaggtggttgagttggatttcttgtatccaagtgagggcattcacaaacgctgggataatggattccgcattacatcaatggctgccacttgggaccaggctgcgctaattctaagtgtgcctagacgcaagtttggtgacgagacacaggaaaccctcagaacctcggcattcccgagtgcccatgtt

SEQ ID NO: 5595 - DNA, 367 bp, Lilium asiatic
  Clone ID: LIB3230-044-P1-K1-A1
aagggagtcatgagtagcggtggcgatggtgattactttctgcgccagctgagctccaatggcacagccacggacagcgacaccaagggatcaaagagatggaggaaggccaagggggccgcggcctcagccagcagcggctgggaggttgagtacagcagcggcagcgagggctacagcggcaatgcgggtgcgaagaagcgggtgatggtggtcatcgaccagactgcggggacgaagcatgcgatgatgtgggcgctcacgcatgttgctaacaagggagatctgctaacactcctccatgtcgttgctccggcggagcaccaccggagggatgagactcccatgcttgctagctcgctgggga

SEQ ID NO: 5596 - DNA, 339 bp, Lilium asiatic
  Clone ID: LIB3230-044-P1-K1-A10
gaaagacagagcgagagaatggcgtcgccgaagacgaggatgatgcttgctgtgaaccagtcgtcgatccacggctacccccatccctccatcagcagccgccgcgccttccagtggacgctggagaagatcgtccgcaccaaccccaccggcttccacttcctcttcctccacgtccagatcccggatgaggacggatttgatgacatggatagtatctatgcctctcctgaagatttccagagaatgaagcagagggacaggacaagagggcttcacttactggagtactttggtggactctgtcatcagaatgggatttcctgtgaagcatggatc

SEQ ID NO: 5597 - DNA, 396 bp, Lilium asiatic
  Clone ID: LIB3230-044-P1-K1-A3
cccacgcgtccgccgggagacgatgagggagttcgtcaagaggctgggagagctagcggaccagcttctcgacctgctgtgtgagaacctggggttggagaaagggtatttgaagaaggcctttagtgggacgaaggggctgaccttcggtaccaaggttagcaactatccgccctcaccgaagccggatctgatcaagggccttcgtgcacacaccgatgctggcggcctcatccttctgtttcaggacgacaaggtgagcggcctccagctgctcaaggacggtgagtgggtggacgtccctcctatgcatcactccatcgtcatcaacctcggtgatcagcttgaggtcattacaaatggcaagtacaagagcgtgctgcaccgagtggtgtc

SEQ ID NO: 5598 - DNA, 284 bp, Lilium asiatic
  Clone ID: LIB3230-044-P1-K1-A5
gaaagcatggagaaattgaggagaagttcaactgtcagttcggtagataagaagcctgcgacaccatacaagctgaagagaagtgtgactgtaggcgttgtagacaacaaacctccctcgcctcacaagatgaaatttcggagaggtaagatcattaatcttcagcctgagagtagcggtccaaggagactcacgttcatgacggtgagagcggagagcgagaaccacagtgaagtcatgaggcggagcttcagaaagaggagagagtcgagcagtgcagggat

SEQ ID NO: 5599 - DNA, 192 bp, Lilium asiatic
  Clone ID: LIB3230-044-P1-K1-A7
ggcgagtgacttgtcattctcaattcagtcaaaacattaatgtgccaggtggtggtcaacactgatgacgacccaaattctatgtgcgccgaagccgatctgaagagagtaagctggagagacagaaggagatctgtggatcgtcactacaagcagcatgtgtgctaatggctggatttacatgtgaatctg

SEQ ID NO: 5600 - DNA, 333 bp, Lilium asiatic
  Clone ID: LIB3230-044-P1-K1-A8
ctttccccggcaacggcccctttggtgcataggttggcgtcattgagtgcgatggtccttcatgcatatgcatgttttcttcgtgcgcatgacccatgcatcctgtgtttgcaaaggtggccatggttgtcgtgggggacgatgccatcatgctcgtatgaatgagcctacgttcgagatggatgggatacggtgcgcttgctcgatgagggagtgccatatgtctttccctggcatcggactttgtgttgtgtaggtgtacggagttgtgtgcaaaggtcctacatgcatatgcatgggttatcttatacacacatgccgtgctacctttta

SEQ ID NO: 5601 - DNA, 387 bp, Lilium asiatic
  Clone ID: LIB3230-044-P1-K1-B10
ggaaaatgtggttgacattttaaaatttgccaaaggatttttggggaggtatgcattatgtcgcctggttcaattgaactatcaagcgcggttgggcattttggctgctgggagttttgggcttcctcaatttcgtatgcgttgttttctttggggtgctcaaccttctgagaaactgcctcaatttccacttcctacccatgatgtggttacccgtggtggtgcgccagttgcatttgagccaaatgttgttgctcttgatgagaatgaaaatcatcttcttaagacagcccttttactcgaagatgcaatttcagatttaccccctgtggataactttgagaaaagggaagaaatggaatatgagcttgaccccataactgattt

SEQ ID NO: 5602 - DNA, 341 bp, Lilium asiatic
  Clone ID: LIB3230-044-P1-K1-B11
gacaaagagagctatcgttggaccattcccgggggtcactcaggacattgctggttacaagattgcaaatcatcctagcatatatgtcctggatacaccaggtgtattggtgcctagcattccagatatagaaacaggtttaaagcttgcattgacaggggctattaaagactcaatagtaggcgaagtacgaattgctcaatatttacttgctgtgttgaacagtcggaaaacacctttatattgggaacggttgcacaatgaacaaataggaggatcatcaagtggtataccaaaaaggcggaatcgactaaatggatctgatgtgatatatattgaga

SEQ ID NO: 5603 - DNA, 281 bp, Lilium asiatic
  Clone ID: LIB3230-044-P1-K1-B12
acctcatctatgctcctaacaaggctaagatgtatacattcaagctctttgtgatcttagatgtgtgccttttcggatcaattgtcctactaacttatacactcacaaagggctcaaaccgcctcgaaatccttggatggatttgtgtcagcttctctgttagcgttttcgcggctcctcttagcataattaaacttgtaatcagaacaaggagcgtcgagttcatgcccttctccctctcctttttcctcaccttgagcgcagttgtttggttcacatac

SEQ ID NO: 5604 - DNA, 409 bp, Lilium asiatic
  Clone ID: LIB3230-044-P1-K1-B2
cccacgcgtccgggggatcaaggggcgcctcaatcgccttccatctgcatgtgtcggcgacatggtgatggctactgtgaagaaggggaagccagatctgaggaagaaggtgatgccggctgtcattgttaggcagcgcaagccgtggcgccgaaaggatggtgtttacatgtacttcgaagataatgctggtgtcattgtgaacccaaagggagaaatgaaaggttctgctatcactggacctatagggaaagaatgtgctgatctctggcccaggattgcaagtgctgccaatgctattgtgtagtttcctgttgcatctgtagtttgacattaggagttttggcatctcttttcaggggtttgataggttatggttatgttgtttgcagaggtgttggatcatgta

SEQ ID NO: 5605 - DNA, 361 bp, Lilium asiatic
  Clone ID: LIB3230-044-P1-K1-B6
cggacgcgtgggtgactgcagaccggataggtggatttcatattaatcttagaaaatgcgcaattattgatgcacaaatttggggattactatttgggttaaacttagcaggtaagaaggcaattcaaagaattaaagtggagatggattctactagtgttatcaatctcatttcttctcaacaagagatctcctttcatctattggcatccatcattatgaactgttgtgatatcatgacgtaatttgtagtgtcaaatacaacatatttttagggagaagaattgtgttgcaggtatgcttgtcacacatatgacttgggttatgtgtactttgatgattccctttatggctttagact

SEQ ID NO: 5606 - DNA, 429 bp, Lilium asiatic
  Clone ID: LIB3230-044-P1-K1-B7
gttttacagccccgcttcctcctgtccttcaaggcgcctctcgcgtacgctgtctcctcctccgccctcacctctcggcgacccctcagctccaatggaagatttgaaaatgaagaaatgtgtgccgtgtgagtcgaaggatattcgacccatgtctgaacaatcagctactgaattacttcaacaggtacgaggatgggatatggcaaatgaaggtggtatcatgaaattgcacaagtcatggaaagtgaagagttttaccaaagggctggagttctttcagcttgtagcgaatattgcagaggcagaaggacatcatccagatcttcatttggtcgggtggaataatgtgataattgagatatggactcactccgtggggtgggtgacagagaatgatttcatcttgcctgcaagatagatgctcta

SEQ ID NO: 5607 - DNA, 364 bp, Lilium asiatic
  Clone ID: LIB3230-044-P1-K1-B8
cggacgcgtgggcggacgcgtgtgcggacgcgtgggcgtcaacggcctctttgcccacatgacgatgaaagagcaacttcgggtgattcaggaagcatcggttgttataggggctcatggtgctggtatgacacacttggttgcggctacaccaggcaccatggtgcttgagatcatcagcagccaatatcggcgcccccattttcagctgatctcgcaatggaaagggttagagtatcatgccatcaatcttgcagggtcgcatgccaggcccgacattgttattgatgagcttatcagcttattgggaagccttggatgctgataaaatttcaggttttggatcggactcttagagataatt

SEQ ID NO: 5608 - DNA, 71 bp, Lilium asiatic
  Clone ID: LIB3230-044-P1-K1-C10
aaaaaaaaaaaaaaaaagaaaaaaaaaaaaaaaaaaaaaaaaaaaaaaaaaaaaaaaaaaaaaaaaaaaaa

SEQ ID NO: 5609 - DNA, 338 bp, Lilium asiatic
  Clone ID: LIB3230-044-P1-K1-C11
gctcaaaccactcatcaatcatgtcaggacgcggcaagggagggaaggggctcggcaaaggcggcgccaagcgtcatcgcaaggtgctgcgggacaacatccagggcatcaccaagccggcaatccgccgccttgctcgccggggcggagtgaagaggatcagcggcctcatctacgaggagaccagaggggtgctcaagatctttctggagaatgtcatccgcgatgctgtcacctacacagagcatgctaggcggaagacggtgacggcgatggatgtcgtctatgctctcaagcgccagggccgcaccctctatggattggggggttgatctttt

SEQ ID NO: 5610 - DNA, 338 bp, Lilium asiatic
  Clone ID: LIB3230-044-P1-K1-C4
gccatttcaccctactcggagtaatagttagatcttgtgaagatgctaaagttaatggagttctttaactgaaggcccatattagctatctaaatcaacctcgtatgatatcctattttttgtagggttattgcttaagtgacgggattgcgtcacagtgtgattaatgccactttgttaagtcgcttgattcacttcttaaagcttaaaggttatgtaattcttaatggttcgtatcagaaaagttgcacattattttcttgtgcgttagcactaatgtagtagatttttgggatgcaaacaaacacttctttgtcaggacacacccttttataagt

SEQ ID NO: 5611 - DNA, 372 bp, Lilium asiatic
  Clone ID: LIB3230-044-P1-K1-C5
gcctcgtcggcgagtgaggaatccgagaggttaccggcgacgatgtcaaactcgaactcgtcgctggattgatcgttctcagcttcgtcgtcggcggcggcggcggagatccgagattcagtgtcctctttcttcatttggaaatgtgtggttggtggattgtgtgtaaagcagagagatgtggtgctaataaaaggaggggaatgacacacgcgcgtaacaagggatttccttgatgcggtgttcgtttttctaagtcaaagtggtggaggtgtgtctctcaaggaacaacctttttcacgcagaacggattatgccatgtgctaaggtacattggttccaacccatatcaatgttatggactatatatct

SEQ ID NO: 5612 - DNA, 412 bp, Lilium asiatic
  Clone ID: LIB3230-044-P1-K1-C7
caaaaagtttgcagatgcaaaatatcaggattcgtgcaatggagttgaaaatccggacctaaaaagaactattcttacagaggtttcttcatctttagccttaattgcaaagcggcatgaaggctatcaaactttatggcaaatttgctatgatctcaatgattctgcactgcttaaaagccttatgcgtgacagcgtagggcctaaaggaggatttagttattttgttttcaaacagctcattgaaagtcgtcattatgctgaattgctgagacttggggaagaatttccggaagagctagctaatttcttgacggaacataaagatctgctatggctacatgagatattcttgcatcgattctcctctgcttcagaaactcttcatgccctggctctgtcggaagatgat

SEQ ID NO: 5613 - DNA, 341 bp, Lilium asiatic
  Clone ID: LIB3230-044-P1-K1-C9
ggagtgagctgtagtgatggagtctggaaagataagcaagggagcatctgggcgcaagggcggggtgaagaagaagtctgtcccgaaatccgtcaaggctggcctccaattccctgttggccgcatcacccgatacctcaaaaagggtcgctatgccaagcgtgtcgggtccggagctccagtctacctcgctgcggtccttgagtaccttgctgctgaggtgctggagctggctggcaatgctgccaaggataacaagaagtcccggataatcccgaggcatgtgtgtttggccgtgaggaacgatgaggagctgagcaaagtgctggccggggtcacca

SEQ ID NO: 5614 - DNA, 318 bp, Lilium asiatic
  Clone ID: LIB3230-044-P1-K1-D10
cggacgcgtgggcggacgcgtgggcggaggctaagcttcttttcatcattcgcatccgcggtatcaatgccatgcacccaaagactcgtaaaatcctccagcttcttcgtttgcgccagatctttaatggagtttttctcaaggtcaacaaggccactgtgaacatgttgcaccgagttgaaccctacgtcacttttgggtatcccaacttgaagagtgtcagggagttgatctacaagagaggtttcggcaagcttgataagcaaaggattcctttcactgacaactcttgaattgagcaggggctgtgcaagcatg

SEQ ID NO: 5615 - DNA, 388 bp, Lilium asiatic
  Clone ID: LIB3230-044-P1-K1-D2
cttggagtgcatatatcaaaggtcctatcggtgaagttagatgagtggacagatgaacaagtagatactttgactgacaggggtgggaatgctgcagtaaatatgagatatgaagctttcattcctgaaaatctgaaaaagccaaggccagattctcctatagaagaacgatctgacttcatcaggagaaaatacgagatgcaacagttttcaaactccaacctacagatggtccctgcaacacgtactactttgagtacaatccttcagaacaattctgacagcggtaaacattatgagaaacaacacactggcatccgcaatgcatttcggaatagctggagaaaaaaggagtccgagataaaggcagctaagaaaatgatgggta

SEQ ID NO: 5616 - DNA, 386 bp, Lilium asiatic
  Clone ID: LIB3230-044-P1-K1-D3
cctctaccaccttgatgagcaactagacctactgaacaaggtactgaatgcaggggatgttgaagctggattagagcagctggaagaagatgctgatgatatcacgctccacagagcccggcgttctgcagggtcgatgagtgcgttctcaggagcaagcggcatggtttacatggagtacaacactgggcggaagggtgggcagggtcagcagaagatcaaagccaaggatccatccaagaggcattcgttgtttaagaagcgcttcaattaaggctcgaggcgtctgggttattcaagctccttgcaacaattgagatgtaattagacaacaattgagatgtaatctgatgggtctataacttgatatgagtattgtgtatatg

SEQ ID NO: 5617 - DNA, 355 bp, Lilium asiatic
  Clone ID: LIB3230-044-P1-K1-D4
cccaagaatctgcactaaatgtcggttttgctgccccctaaatgtggctcagaagtcgagcgacctcgacaaaggcctctcggtgtccatgtccccctccgactcgagcgaagaagtcgtgcatctcctcaccgacctcaaaatcgagttcacatctcctccctccgatggtgggtcgccagtatggaagctcgacagctctgagcccaacggccaacgatatgtgacactaaacgggtctccgcataatgaaatcaaccacgataacatgttcaaaattgagaaagcaggtgctttgggctacaaactgctatactgccccagtgtagccggcgtccctgccgatgggccttgc

SEQ ID NO: 5618 - DNA, 352 bp, Lilium asiatic
  Clone ID: LIB3230-044-P1-K1-D6
cggacgcgtggtcggacgcgtgggcgctatggtcaccaagaaggccgaagccaaggtggcaccgaagaggaaggcggcggagaagccgatcatggcggccaagccggcgaagaaggggaaggccggcgttgaccccaacaaacccaagcgccccgccagtgccttcttcgtgttcatggaggagttcaggaaggagttcaaggagaagaaccccaacaacaaggccgtctctgctgtgagcaaggctgggggagacaagtggaaatcgatgtctgatgctgataaggcaccctatcaggctaaggccaacatgcgttagactgagtacaccaagaacatggacgcctacaac

SEQ ID NO: 5619 - DNA, 357 bp, Lilium asiatic
  Clone ID: LIB3230-044-P1-K1-D7
gtcctcagcgcctacctcatcggcatggaagccggcgacggccggggccggagctcgtgccacaaaaagtacctcagcctcaatcagtactgtgagagctggagatccaatgtggagctgcacaacatccggggattaaccaccatccccggcgagtgcggcgagtacatcggcaaatacatgacgtcgacgcagtacgactccgacgtgcagcggtcggcggaggaggcgtcgaactttctcatcagcaagtacaaggccggaggggatgagaaggatgcttgggtggttgatgtcgacgacacttctcttttaacgcttgcttattatcagaagcaccactttggggcttgtaca

SEQ ID NO: 5620 - DNA, 341 bp, Lilium asiatic
  Clone ID: LIB3230-044-P1-K1-D9
ctagacttcaacttcagccacagtttcgatggagaccggatcgaaggccaagaagggcgccggcggacgcatgggcggaccgaaggcaaaatcggtgagccgatccgtcaaggccggcctgcagttccctgttggcaggattggccgcttcctcaagaaaggccgctattctcagcgtgttggctctggagctcctgtctatctcgctgccgtgcttgagtacctcgctgctgagagtcttgagttggcgggcaatgcggccagggacaacaagaagaacccgattgttccccgacatgtgtgcttggctttgagaaatgttgaggagcttgggaggctgt

SEQ ID NO: 5621 - DNA, 427 bp, Lilium asiatic
  Clone ID: LIB3230-044-P1-K1-E1
caaagcactgtccgtgcatggttacaagacagaagcctgcgagtgactcataatttggcgatttttggtggttgcggccttatcatctccatcatcactggccttttcggcataaatgtcgatggcatccctggggccgaaaatactccatttgcattcgctttattttcgggaattctttttctcattggaatcatcattattggccttgggatactctatttcgggctgaaagacccaatctccgaggagcaggttaatgtaagaaaaatggagcttcaacaattggtctcgacgtttcagcacgatgcagaaacacatgcgaaggttagagaaggcattgcgagacataacttgcaggatgattccatcggcacaccggagtacattcttattacctgaggatgatgtataggtttcaacatga

SEQ ID NO: 5622 - DNA, 309 bp, Lilium asiatic
  Clone ID: LIB3230-044-P1-K1-E12
gtttttgtggtcttcagaagaaattgtacggcggcatagtgaatactggcctcttgtgatggatatagctcgaaaaaataagcttccgcgtattattaggtgtagccaaatcatgggtcggagcgagcaggatgagttgactgctgcccagattatgtacccactaatgcagtgtgctgacatattctttttgaaggctgacatttgccagttaggaatggatcagcgcaaggttaatgttcttgcaagggagtattgtgatgacattaaaagaaaaaataaacccatcattctctcacaccatatgct

SEQ ID NO: 5623 - DNA, 401 bp, Lilium asiatic
  unsure (1)..(401): unsure at all n locations
  Clone ID: LIB3230-044-P1-K1-E4
ggattatgctttcttgctgaaaggtcatgaggatttgcgccaagatgaacgagtcatgcagctttttggtttggtgaatactcttctacagagctcaagaaaaactgcagataaagacctttcaattcaacgttatgcagttattcccttgtctcccaacagtggcttgattggctgggttccaaattgtgacacccttcatcatctcattcgagaatatagggatgccagaaagatcttcctaaatcaagagcataggtgtatgctagcttttgcaccagactatgaccacctgccacttatagcgaaggttgaagtatttgagcatgctctgcagaacactgagggaaatgacttggcgaangttctgtggttaaagtctcgaacttctgaaattggct

SEQ ID NO: 5624 - DNA, 414 bp, Lilium asiatic
  Clone ID: LIB3230-044-P1-K1-E7
gccaaggagcctgagaaacacgtcttccatctggtcaccgataaactcaacttcggagctatgaacatgtggttcctactaaatccaccagggaaagcaaccattcatgtagaaaacgtcgatgacttcaaatggctgaattcttcatactgccctgtgcttaagcagctcgaatctgctgctatgaaagagttctacttcaaggcaaatcatcctacaactctttcagcgggttcatccaatttgaagtaccggaacccaaagtacctttcaatgctcaatcatctgaggttctacctcccacaggtctatccgaaactggataagatactttttcttgatgatgacattgtcgtccagaaggatttgacagggttatgggcgggccgatcttaaaggaaacgtaaatggtgc

SEQ ID NO: 5625 - DNA, 312 bp, Lilium asiatic
  Clone ID: LIB3230-044-P1-K1-E9
cggacgcgtgggcgagattccaggctccagatctccgagcaccagcagagagtgatgacggcggcggcatggcggcgctatggtctggcggcggtggctcttatggcggtgttatcctctcatctcgcgtcctccgccaagacacataggtcattcgtgaggaagaccgtcgcctcccacgacatcgtcatcttctccaaatcctactgcccgtattgtaaaaaagcaaaagctgttttcaaagaattaaacagtgtacctcatgttgtggagctggaccagagagaggatgggtcggatatccaaggtgct

SEQ ID NO: 5626 - DNA, 351 bp, Lilium asiatic
  Clone ID: LIB3230-044-P1-K1-F10
ctcggtcaccccctatgcagcctcaggtggcgccgccggcgtagacaagggcgtcgactttgccaactacttctgcacctacgccttcctctaccaccagaaagagttgctctccgaccgcgtccgcatggatgcctacttcaacgccatcttccagaatcgtcaccacttccgcaacaaggttgtcttggatgttggtgctggcagcgggatactggcgatatggttggcttaagctagggcgaggaaggtgtatgcggtggaggcgactaagatggcggatcatgcccgagcgctcgttgcggcgaatgatgtgagggaggtgggtgaggttattgagcgggccatgga

SEQ ID NO: 5627 - DNA, 375 bp, Lilium asiatic
  Clone ID: LIB3230-044-P1-K1-F11
cccacgcgtccgcggacgcgtgggtttttttttttttttttttaccgggcaatcatcagatcactaaagaaaatgatgctaaagaacacagagcacacaaaccacccaaaatgcatgaaattcacaagtaccttacaaaaggtctcatcagcagcaatcatctcagcagtgtatataagaaacaaccgcaaataaaccaagttaaagaccactagtaaactttattaggcagggcaaactgcaacacatccagagatacagcaaattgtgattacttgttcccagcgatattccccatcattttagcaagcacgggtgccaccttcggatttgattggtgtttcgcaatatttgccgggttgctcatcacatctt

SEQ ID NO: 5628 - DNA, 355 bp, Lilium asiatic
  Clone ID: LIB3230-044-P1-K1-F2
acgctttcgaactatcaccaccgcatactatcgaggtgctatgggcattttgcttgtgtatgatgttaccgatgagtcatcttttaataacataaggaactggattcggaacattgagcaacatgcctctgataatgtcaacaagattctggtgggcaacaaggctgacatggatgaaagcaaaagggcggtacctactgcaaaaggacaagctctggctgatgaatatggcatcaagttttttgagacaagtgcaaagacgaatctgaatgtggagcaggttttcttctccattgctagagatatcaagcaaagactttctgaagttgataccaaagctgaggatcggacactc

SEQ ID NO: 5629 - DNA, 180 bp, Lilium asiatic
  Clone ID: LIB3230-044-P1-K1-F5
tcgtcttcttctacttggccgagaacaatgttttgttcgaggggatcctactcaagccaagcatggtcacgccaggtgcggaatgcacagaaagagctacacccgagcaagtggctgactacaccttgaagcttttaaagaggagaataccacctgctgttcctggcataatgttcctgt

SEQ ID NO: 5630 - DNA, 157 bp, Lilium asiatic
  Clone ID: LIB3230-044-P1-K1-F6
atcaactctctgtccatgttaatttgcgctccatggatccctctctgtatcaagcggattcatcgtttgaagcagacgattgggatactgactggtttgtgatccccaacttgggtggcgtaagaatctatattatgaacagtaatgttcccgtagt

SEQ ID NO: 5631 - DNA, 420 bp, Lilium asiatic
  Clone ID: LIB3230-044-P1-K1-F9
agcacgtcgaggagcaatggtggaagtagaagaaatccctccctgagtgtatcgagacacaactgatgagggtgtagaaggggagagtgacgaggatggaactccttacgacgacacaatcaaccgtgaaattggagtcacccagacgagtccgcaagcccgaaactccgactccaccacacaacactaagtgcaaggagggatgagatattttcgaagaaaccctggctcacataacatcgccaaacaaatctcacatatctccattggccttggattctgatgacgaaaattgccgattagtcgaaatcattaaggggagagggaagagggaagagggaagaaagacacttgtcatgtagatgacgaagaaaggacgcacaaacgtgaatgaggctgaaattggagctccattgagcc

SEQ ID NO: 5632 - DNA, 410 bp, Lilium asiatic
  Clone ID: LIB3230-044-P1-K1-G1
gtgaaatgattcgagaatatgatagttatcttggacctggaagtgtattggaaatactatcagaagcttccatccaagaaaggaatagtatagtcaatcctgtgattcaaagtcatctaaaaaatgtcaaagtttctcacaaggtgggaagtcctgtgaactatgagatactgaaggaaactatattaaacacaagaagttctttcaagggtgcaaaagatattcccttatctattgtggttatatctgacagagaatggctctttggagattcttccagggcagacaagaatgcagcatacacgcttcttcttgctgaaatggtttgcaacaaacacggtattaaggttgagaacttggttgccgaaattgttgacacaactcttgtgaaacagataacatggttaaga

SEQ ID NO: 5633 - DNA, 306 bp, Lilium asiatic
  Clone ID: LIB3230-044-P1-K1-G12
cggacgcgtgggctccaatctccaatcctcaatcccctctcaaattcctctgatggcgcccaaggccgagaagaagcccgcggagaagaagccggtggcggagaagcctgccgccgaggaggagaagaaagctgccccggcagcagcaccggcggagaagaagccggccgagaagaagcccaaggccgggaagaaggtcccggcctccaagggcaaggagggggagaagaagaagaagaggtcgaagaagtcggtggagacctacaagatctacatcttcaaggtgttgaaacaggtccaccccga

SEQ ID NO: 5634 - DNA, 381 bp, Lilium asiatic
  Clone ID: LIB3230-044-P1-K1-G2
aatttgttgaaattttggacgaggaactccagagaaggggactggatgttaaagtattcagtaaatggaagggtatccatgagtcaacaacgaatctagaaatagtctggcctccaatggtagtccttttcaataccttacagaaaaaaacagatactgatgagggtgtccgtatctcttgtacggagctatgtgaatatttcaaagattatgcagtggcaaaagctcaccattgttatggtcctactggacatcaaggaatgagtgtcttgatatttgaggcttctgcgatgggttactgggaagctgaaaacctgcacaagcattttctggccactgggagagatagagaagcatgggagcaaaattcatgtgtaggat

SEQ ID NO: 5635 - DNA, 378 bp, Lilium asiatic
  Clone ID: LIB3230-044-P1-K1-G3
atttgttgctgaattctatttttttttccatttctcaatttttttttgaaacatgttgtcatgaaatttggttggtttgggtggagttggctgtttgttttcgaaggaaatgttgctagtctgcctctgaagttctcctgcaaccatttaattgtttcattttccttcccccagacacatttctatttatctttgtataattttaatttggagtttagtattaaagagcttgtcttgtgtttcattgagttctcaaaatgattgtggttttcaatctgttatattttcttaaattaagatgggacatgattgtattgagaattttgtggagagcaatagttgtgtttttcaatctaatttaccttcttaaattaagat

SEQ ID NO: 5636 - DNA, 340 bp, Lilium asiatic
  Clone ID: LIB3230-044-P1-K1-G9
gccaaaagcccatcaaaggctcgccatacccaaggggttactacaggtgtagcagctcaaagggttgcccagcaagaaagcaggtggagcgaagcagctcagatccaaccatgctggttgtcacctactcctgcgagcacaaccactcctggccgctaccgaagagccatcaccgctccgctgctgttattctcaacacttcaattccctcaccggtgttgaatgaggaagagcctgaggcggtgttggtggttccggtaaccgagccggcggaggacaagttcttgattggcgaggagttgatgccggatgagtactactggttctctgttgtcgggtc

SEQ ID NO: 5637 - DNA, 379 bp, Lilium asiatic
  Clone ID: LIB3230-044-P1-K1-H1
caaaaaattctacgataaaaaatgacgagaggtcccagagatttggcaatgttgatgaaaatcgagtactggatccggtagtcgagaagactgttgtgatgcttgaatctggcgctgttcctactcctatcgtccaggcatctaacaatgttgtggacactgaagttaagtcacacagagatgacggtagagacaggactggtccaggctcggagtatgtggttattcgagccccgccttcaccaattgccaatgaagttggttactccagtgaatctgagttggaagagcagcagaatacatctgaggtatgatatatcttttcttgaagaactggggtgttttttaagttacaagtatgtggcactttgacttataa

SEQ ID NO: 5638 - DNA, 406 bp, Lilium asiatic
  Clone ID: LIB3230-044-P1-K1-H12
cccttttggacagaggaaggactcggtcaatggtgctacgcataaagtcaacggagctcttacatatcagcagtagcttgaaggggggagtttgctctctctgttcttaaaatagaaagatgccatgctgttgcatcacacatcccaagacatctagtgcataattgcttgtgtgaatgcacctggtgatcatgagtgccattaacatcatgcatgatgcggaattacattttgctgttacttaagagtggattagcattctcaccatggatactttatgttttatgtgtagtacttctcagttgtggcagtagtttgacttgtgactcattcatatgtactaggatcatgggcatgggtgtttaatgttgagacatctctgtaacaagacagattttaccctttg

SEQ ID NO: 5639 - DNA, 302 bp, Lilium asiatic
  Clone ID: LIB3230-044-P1-K1-H2
ccctattcatatttactcctatagcacagaacctatcaacatttttcatggaagctatgatactgatacacctcctgtcagattaagtttccatcatggtaatcattacaattcccttgttgatcctcgtcgattgacaattggcgcaggtcttggatttagtagtcttcaggggaccaacgttgatagagaccaggtcaaggctgttatcaaagctcagcaagaccagcagattgattatgcactgctagcggaggggcgattctactctgatctggaactgaccgaaaaggagatggagc

SEQ ID NO: 5640 - DNA, 342 bp, Lilium asiatic
  Clone ID: LIB3230-044-P1-K1-H3
gcgcagtctagggtttcatctccttcgacctcgtcgccatggctcgccgctccggtggaggaagatctgcccctcgccctgctgcccggtccccagcgaggaacccccctcagccagttcgtcaggcaccaccaccagctactgctcaggcaggcggatcttcgatgctcggggggcttggtgcgaccatcgcacaaggtatggcttttggtaccggaagtgctgttgcgcacagggccgtcgatgctattgtgggccctcgcacaattcagcatgagaatgctgctgcttcagaacctactgctactactgctggaggcgatgcatgcaacatgcatacaa

SEQ ID NO: 5641 - DNA, 406 bp, Lilium asiatic
  Clone ID: LIB3230-044-P1-K1-H5
cttaaacttattgttgtaacattatgaacaaacaagcgaacgccaggctttcattcataatgttacaacaataagtttaagacactgaaaccataagagaaggaaataagaagcctgtatattagctccactctctattttctcctcgcctcaacagagagcataaaaggaaacaccactgagaataaaatacaagttaccaatgtgagtacttaaaacagaagatacccaggaagcaatagccgcttctccaataaaatgaggcaattgccttccccttaactccaagatctataccagcatgtcatttcatgcttcaacagcccattattgcacaattgtaaacataagcaccagctcgttccctgacagagagcacattccaatctgctccatcaacattttc

SEQ ID NO: 5642 - DNA, 361 bp, Lilium asiatic
  Clone ID: LIB3230-044-P1-K1-H8
aaaaacaaaaaagagaaaaaaaaaaaaaaagacgaggaaaaaaagaaaaaagaggggaaaaaaaaaagagaaaaaaaaaaaagaaagaaaaagaaaagaaagggagagaaaaaagggaaaaaagagaaaagaacaaaaaagaaaaaaagagaaaaaaaaaaaaaggaaaaaaaaaaaaaaagagaaaaaagaaagaaaaaagaaaaaaaaaaaaaaaagagaaagaaaaaaaaaaaaaaggagaaaaaaaagcaaaaaaaagaaaaaaaaaagaaaagaagaaaaggaagaaaaaaagaaaaaaaaaaaaggggaaaaaaaaatcgaaagaaaagtagaaaaaaaaaaggaaaaaaaaaaa

SEQ ID NO: 5643 - DNA, 329 bp, Lilium asiatic
  unsure (1)..(329): unsure at all n locations
  Clone ID: LIB3230-045-P1-K1-A1
cccacgcgaacgcccacgcgaacggcatanangaaagcaaaaaggagaccgcagggggccgggaggaacccgngggggaaaaacaacgaggggggggcacaagcaaaaaacgaggccgggacaaaaacacaacagaaaaaaaganggaaggcggagacagaggagggggcgccggaaaaaaaaacccggcacgggcaagaaacaaagggaaacacccccgagcccacggagggggaaagagccaaggaggaacagaaaacacaaaaaaaaagaggaccgggggccaaaaacaaacaaaagcggaagggaaaaaaaagccacaagaggag

SEQ ID NO: 5644 - DNA, 399 bp, Lilium asiatic
  Clone ID: LIB3230-045-P1-K1-A10
gacgccctcgtgggtggttggcttgatattctctgcagccaggtcctttgtgtggttaacttcttgtagcctccttactgttctctgggcgcttcttattggtcttcttgcaactctgcttcatgccagctttagaacacctaatctaaaagcacgcttgaacaccgtccgcgaggagtttcgtgcggtatggcgcaattatggtgagctgtagctgtgctaaactggaagcaatatgttgtgagcagtctgcaggactttacttctatgggaccttgaatatgctacttttgtttgaaagcctgatgtgacattctcaaaggtgtgtggatatatctgttaccctaataggattctactttgtacatatattgttagtacttggtatggatcagagcg

SEQ ID NO: 5645 - DNA, 386 bp, Lilium asiatic
  Clone ID: LIB3230-045-P1-K1-A11
cggcatgcttcttcacctccgttctctccgccgtttcgagcacagcggtggctggattcgagctctgatggaggaggccgagaacgagcgaatgcacctaatgacattcatggaagtctcacagcctagatggtatgaacgcgccctagtcttggccgtgcagggtgtcttcttcaatgcatacttccttggctatcttctatcgcccaagttcgcccaccgtgtagtcggctatctcgaggaggaagccatccactcatacaccgaattcttgaaagagcttgacaagggaaatatcgacaatgtccccgctccagtcattgccatcgactactggcgcctgcctgctggatccactcttcgtgatgtggtcattgttgtcagag

SEQ ID NO: 5646 - DNA, 398 bp, Lilium asiatic
  Clone ID: LIB3230-045-P1-K1-A12
tggacagatcccgattccattcctttgatggttatgcagagtatactgggttcttggaataagaattctggtggaggaaagcacatggggtcagagctggttcagaggattgcaattaatgacatagctgagagcatgatggcttttaataccaactatagagacactggactctttggtgtttatgcagttgccaagccggattgcttggatgatttggcatatgcaatcatgtatgagataagtaagctgtcctaccgggtttcagaagctgatgtcactcgtgctcgaaatcagctaaaatcttctcttcaactccacattgatggtactagccctgtagctgaagatattggccgtcagctccttacatacggcagaagaatcccagttgctga

SEQ ID NO: 5647 - DNA, 404 bp, Lilium asiatic
  Clone ID: LIB3230-045-P1-K1-A2
cccacgcgtgcgcccacgcgtccggtatttttgaatgcaaataggttaccggaggggcctgttaggtcctcgctgagtaattcggacgaggctgttgctcaggcatattctgatcttgtatcaacatctaagcagacaattagttgtatgttggagcttgaggaggctttgttggaaaagaaccctgctattgttcaagacacaaaggaaaacagccaagattctttgaagggtgaaaggtccatggatgacttgaaaacacaaaaagatgatgactgggctcaaatacacagaatgcagtgcagaatagcgccatttaggaataactctgtagacaggtggcaagggaagatgcaggtgacatctggtgcagctgcgataaaaaacatattgcacgcatttaa

SEQ ID NO: 5648 - DNA, 407 bp, Lilium asiatic
  Clone ID: LIB3230-045-P1-K1-A3
ggaaaaattgggaagaggtcttcaaagaaatatttgctgatcatgtggagttttgtggccaacaatagggagttcttaagtcttcgaaacttcttgtttatgtaactggaaccaaagtttgggactgtaaaaggatgatcttacgtgtaattagactgcaattacgataatacaactaattttacaaaggcttggaaattctcaaactatataccatgggactacttttgacctttctacattgattccaatgaaagacaatcaagttggccacctcttgactgaaattgctaaatctattgtttgatattgtacttggaatgtctagaacgcccaaaacatgagtgtatggaatgcaacatggagaggccctcagtggaagctagtaagcctacagctgtgttagg

SEQ ID NO: 5649 - DNA, 404 bp, Lilium asiatic
  Clone ID: LIB3230-045-P1-K1-A4
atttacgaatatcctcttttcatctggtactacaggggaacctaaggtaattccgtggacgcacgcaactcctctcaaagctgctgcggatgcatggtctcatatggatattcgtaaaggtgatattgttgcatggcctactaatctcggttggatgatggggccttggcttgtctatgctactttactaaatggagcttcgatggctctctacaacggcacaccccttggctctggatttgccaagttcgtacaggatgctagagtaaccatgcttggtgttgttccaagtattgtccgtgcttggaaaaacacaaactgcactgcaggctttgattggtcaagaattagatgttttagttccagtggtgaggcatcaagtgtcgatgagtacttatggctga

SEQ ID NO: 5650 - DNA, 402 bp, Lilium asiatic
  Clone ID: LIB3230-045-P1-K1-A7
cccacgcgtccgcccacgcgtccggcatttttgaatgcaaataggttaccgcaggagcctgttaggtcctcgttgtgtaattcggacgaggctgttgctcaggcatattctgatcttgtatcaacatctcagcagacaataagttgtatgttggagcttgaggaggctttgctggaaaagaaccctgctattgttcaagacacaaaggaaaacagccaagattctttgaaggatgaaagttccatggatgacttgaaaacacaaaaagatgatgactgggctcaaatacacagaatgcagtgcagaatagcgccatttaggaataactctgtagacaggtggcaagggaagatgcaggtgacatctggtgcagctgcgataaaaaacaaattgcacgcattt

SEQ ID NO: 5651 - DNA, 398 bp, Lilium asiatic
  Clone ID: LIB3230-045-P1-K1-A8
cggacgcgtgggccgacttggctcattgtgagggctgtctcacttttgttgcttggtactgttattgcagccgcatttgctgatcctcttgtagatgctgttgacaatttctcaaccgctacaaaaataccttctttcttcatttccttcatcgctatgcctttggctactaactctagcgaggctgtctcagcaatcatttttgctagccgaaagaagcaaagaacttcatcacttacattatctgagatatacggtggagtcactatgaacaatacactttgccttgccgtcttcttatcccttgtccatttcagaggcctaaagtgggacttctcgtccgaagtactcatcatttttatcgtctgtatagtgatgggccttttcacaagcttccg

SEQ ID NO: 5652 - DNA, 403 bp, Lilium asiatic
  Clone ID: LIB3230-045-P1-K1-B1
ggcgtgggcaagcctgttgacggggagagggaacgcggatcgtatgctccatcgtggcagtcgtcgccgggcagtcgtcgtggcggttattatggtggtcgcggcggctatggcggtgggtatggcggcggcggcgggtatggtggtgggtatgggaatccagaggctggaggcgatgctgaacgccgcccacggagggatgctggaggggactctgaccgtggtccgcggaggacctttgaccgacacagtggcactggccgcccgagtgggtttaagcgtgagggaggaggacccaggaactggggtactgtgaatgatgatgtgcttgcacaggaaactgaggaggtcttgaatgttgaagagaagtctgcaactgataagctcccagagcagggagatg

SEQ ID NO: 5653 - DNA, 402 bp, Lilium asiatic
  Clone ID: LIB3230-045-P1-K1-B11
gtgactctaaaggttccttcaagccagagacacgtacagtttgcgtgggacgagacagattggagagattcgtataaccgtgctagacccatgataaagccaagaggatttacttcggcaatttcaatctccgatgaaaaaagagtaataaaacacagtgtcaacttccagaaaatttggagcagtgaacaagaatataggcaccgttgtgcattgtttccaaagcaggttgtcgatgatagcaccatatgcagcatttggaggccaatttgtcctgatgggtatgtttctgttggtgatgtagctcatgttggcgtccattcaccgcatgttgcagccatctatcgagattctgatgaaaactttgccctccctgtgggctatgacctagtgtggaggaac

SEQ ID NO: 5654 - DNA, 355 bp, Lilium asiatic
  Clone ID: LIB3230-045-P1-K1-B12
ggccgtcattccggcgggggcgctgaacatcggcgtccaacacaccaactccggcgtctacgcgaataaggcgcaggagtgtagcaggaagtgtgaatctgagtactgtaatgttccaccgttccttcgatacggtaaatactgcggcatcctctacagcggctgccccggcgagaagccctgcgacggcctcgacgcctgctgcgagaaccacgacgcctgcattcaggctcaccacaatgagtatttgagccaggagtgcaacagcaaatttttggactgtatggaggccgtgagggagtccggttcgtcaaccttcaagggcaacaagtgcatggtggaggaggtgatggac

SEQ ID NO: 5655 - DNA, 403 bp, Lilium asiatic
  Clone ID: LIB3230-045-P1-K1-B6
attgatgtgtgttttataggaactatagctcttaatgcaaggtacctatgagatgttccactacatgactagccaatcctgggataatttttccaatttcgtaactcactttgatatcctaatatcaaagttaatttatttttaaattgttcacctccttttaaaggttcttttaccattggtttttgcgttctaagtctaccctaaccttacctttatagttgatacagattgatggtcgagggtaaagatggaaattgattgtgtgttgtgtgtaagcggaagcaaaattcacttttggacgcaactcaatcaactgtttcaaatatcaatagagagattacacccgtttgaattatttattttcccccgaacagtatcatatattgattaccggtggatg

SEQ ID NO: 5656 - DNA, 344 bp, Lilium asiatic
  Clone ID: LIB3230-045-P1-K1-B7
tcgacccacgcctaccgcgcgggcaagcctgttgacggggagagggaactcggatcgcatgctccatcggggcagtgcgcgtcgggcagtcgttctggcggttattatggtggtcgcggcggctattgcggtgggtatggcggaggcggcgggattggtggtgggtatgggaatccacttgttaaaggcgttgcaccatgccgtcctccgaggtatgcctaccctgaccttgtccgtggtgttcgtacgtatttattcctgtacagatatcactggcctcccattttgtgttaagtgttaggggtgtggacctttcacacttggcccctgtcatttaatttttt

SEQ ID NO: 5657 - DNA, 264 bp, Lilium asiatic
  Clone ID: LIB3230-045-P1-K1-B9
ccacgcgcacggcgaaactggcaaagtgcttgaagaaatgagagaatctagggctccgagtcaaaggatcggtgcgtgaactaacactttccgaacagcagtaggagaagaagaggaaggcggctaaggcaattgatgggatgcacaacatactcataaacaaagtggggacaaatataaggaagtccactcgttgagaatacaggaaaggagatcacatttctttaggacaacaacatcgaaaacgttaaacatacaagccag

SEQ ID NO: 5658 - DNA, 401 bp, Lilium asiatic
  Clone ID: LIB3230-045-P1-K1-C2
gcggaactggcggagtgcttgaagaaatgggaggggctagggtttcgcgtctctggatcggtgtgtgatctctcgctttccgatcagcgggaggagttgttgaggaaggtggctaaggcatttgatgggaagctcaacatactcataaacaatgtggggacaaatataaggaagcctactgttgagtatacaggagaggagttctctttccttttggccaccaacatcgaatccgctttccatacgtgccagcttgcacatcctctcctaaaagcatctggcgtggggagtatcatatttatctcctctgttgccggcgtggttgctatacccagtggttccatttatggggcaactaaaggagcgatgaatcagcttgcaaagaatttagcatgtgaatg

SEQ ID NO: 5659 - DNA, 408 bp, Lilium asiatic
  Clone ID: LIB3230-045-P1-K1-C5
ctgatcccgtagaccgtgagaaaacttgccctcttttgcttcgggttttcaccaagactggtggccaccactcggacgaagaatttgctacgagaggaaaggagcccaaagatgaagtccagatatatacatggaaggatgctacacttcgagaactaactgacctggtcaaagaggttgctcttgcagcgaggaaaagagatgcgaagctgtcatttgcatttgtgtatcctgacaagcgtggtcgttatgtcgtgaggccggttggcatggcattttcgtatggaaataatcggcgattggatgatgcaaagacattacaagatctcaactttcaggttggagattacttgagtgttgctatcatttagagggattagctgcgataccggtgggaagctggactgg

SEQ ID NO: 5660 - DNA, 179 bp, Lilium asiatic
  Clone ID: LIB3230-045-P1-K1-C6
ccacgcgttcgctgatcccgcataccgcgagaaaactttctcttttttgcttccggttttcaccaggacgggtggccactacttttacgaagaatcatctaccagaggaaaggagcccaaaatataaggaccagtaatatactaggatggatgctaacactttgagaactaactgacct

SEQ ID NO: 5661 - DNA, 377 bp, Lilium asiatic
  Clone ID: LIB3230-045-P1-K1-C8
gaaagtttgagaaggccagagggaggaggaagagcagaggttttaaagtgtaatcaagttcatcttatttatgaagaaagcaggtttgaaggctctaatgtagcagtggtgatcttctatctgaatttgtgtttcatttctttttcagttatttgcaggattgtagggattttgttttttccctcaagaaagacaatcacatgcttgcatttcaacaagaggtgcatagatttagctgaagtactaaacagcaacatagatccgccctttttttttttttttcaaaaccctattaaaccccttaccaaacaaaagggacaagccacccaaatgctaatcacactggagtagccttcttcacctccctcggcttgcct

SEQ ID NO: 5662 - DNA, 403 bp, Lilium asiatic
  Clone ID: LIB3230-045-P1-K1-D1
ggttgtcgggtgcttggtggagcataataacaaggttttactgtgtaaacggaagatccaaccatcttatgggctttggacccttcctgccggatacttggaaattggagagtcagctgcagaaggggcagctagggaaaccttagaagaagcatgtgctgtagtcgaaataatctcaccttttgctcagctagatatcccccgtattggccaatacagagctacatcattttcctagcaaaactgaaggagcctcatttttcacctgggatcgaatcgctggaatgtgcgctctttagcttggatgacataccattcgactccctggcattctcatcgatttacgttaccttaaaaatgtacatagaagatatcaaggctgggaaacttaattttcattact

SEQ ID NO: 5663 - DNA, 406 bp, Lilium asiatic
  Clone ID: LIB3230-045-P1-K1-D4
caagaagtaccacccacccctggccaacccatcaaagagcccatgtttatacctgttgctgtcgggctccttggctcgaatgggaaggacctacctctctctgctgtttatcatgatggtttgttgaagaccgttgaaattggtgatcaacctgttgccacaaccatccttaaagtaaccaagaaggaagaagaatttgtgttcactggtattaatgagcgaccaatcccttcccttctgcgagggttcagcgctcctattcgtcttgagtccgatcttacagacagtgacctatttttcctacttgcaaacgattctgatgaattcaaccgatgggagtcaggtcaagtcttagcaaggaagttgatgctcggtcttatagctgattatcagcaaaacaaaccat

SEQ ID NO: 5664 - DNA, 282 bp, Lilium asiatic
  Clone ID: LIB3230-045-P1-K1-D8
cggcccacctcgtccagcgagctccgtcggcgcaggtggtagatcggagcaattccaaatttcagaacggggcactattacgagctttggcaggcaagaagcgagctttggtctctcttagaggggtcagaatggagcaatttcagatctggtgagtatttttctgatcaacaagattggtatcgatgacctgggtagccattacgacggtacgtatctgaggctttacaacctcgacgcagacgccctggggcttctgctgcacgccctttgtaggacgga

SEQ ID NO: 5665 - DNA, 403 bp, Lilium asiatic
  Clone ID: LIB3230-045-P1-K1-D9
cagatttgttcgagctgattctcaggtctttctctttgccaactctaaatgcaagcactacttccacaaccgcctcaagcctgcaaagcttgcctggacagcaatgtacaggaaacagcacaagaaggatatccatgctgaagcagtgaagaagaggcgtcgcaccacgaagaagccttattcaaggtccattgttggtgcaaccttggaagtaatccagaagaagagagctgagaagccggaagttcgagatgctgctagggaagcagctctgcgtgagataaaggagcgggtgaaaaagaccaaggatgaaaagaaagctaagaaggctgagcttgcctctaagactcagaagacccagaccaagggtggtggcatgaccaaggctgccaagggacctaag

SEQ ID NO: 5666 - DNA, 321 bp, Lilium asiatic
  Clone ID: LIB3230-045-P1-K1-E12
attgaggaatacaaactggatggacatattcgatggatatctgcccagatgaaccgtgtccgcaatggtgagctgtatcgctacatcgcagattgcaaaggagcatttgtacagcctgcattctacgaagctttcggacttactgttgtggagtccatgacttgtggtctacccacatttgctactttgcacggaggacctggggagatcatagtggacggtgtctccggcttccacatcgatccctatcagggtgataaagcttctgagttacttgctgatttctttgaaaaatgtaaggaagatgggacacattgggat

SEQ ID NO: 5667 - DNA, 405 bp, Lilium asiatic
  Clone ID: LIB3230-045-P1-K1-E2
gcaatattctgaaacgtgttccaaacagtgcgttatggctgctcaggtttcctgcagctggtgagatgagattgcgagcatatgctgctgcgcagggagtgagaccagatcagattatttttacagatgtcgccatgaagaatgagcacatcagacgcagtgctctagcagatctttgccttgacacgccgctatgtaacgctcacacaacaggcacagatgtattgtgggctggtgttcctatggttactctacccctagagaagatggccaccagagttgcaggatcattgtgtcgtgccacaggactgggagacgagatgattgtgaacagcttagcggaatatgaagagaaggctgtagctttggctttaaatccctcaaagctccaagcactaaccaacc

SEQ ID NO: 5668 - DNA, 405 bp, Lilium asiatic
  Clone ID: LIB3230-045-P1-K1-E3
cggacgcgtgggcgggaactgattatgatgacaaccagctgaggttcagccttttgtgtctggcagctttggaggctccgagagtcctgaatctcaataacagcgaatacttttctggaccatatggggaagatgttgttttcattgctaatgactggcacaccgggcctctttcatgctacttaaagagtatgtaccagtcagttggcatttataagagtgccaaggttgccttctgcattcacaacattgcctaccaaggcagattccccttcgctgatttctcacttctcaatctcccggacaaattcaaatcctcgtttgatttcttcgatggatatttaaaacctgtgaaggggagaaaaataaactggatgagggctggaattttagaagccgacgccg

SEQ ID NO: 5669 - DNA, 404 bp, Lilium asiatic
  Clone ID: LIB3230-045-P1-K1-E5
gtcttgacaaattcttattcggtgataaacgtggaaatcttaactggaagcagaaatttgatataattgtcggcatggctcgaggacttgcttatcttcatcatgaattccatattttgggctggcaaaacttttgcctggtgatcagagtcatcttagcaccagatttgcaggaaccttgggatatacagcacccgagtatgcgctacatggcaaactttctgagaaggttgatacttacagctatggtgttgttgtcttagaaattataagtggaaggaagagcaatgacataaagctggaaccaataagccaatacctgcttgaatgggtatgggatttatatgaaaatggcaaagtgcttgatttggtggacgaaaccataaacccgagtgaatatgatc

SEQ ID NO: 5670 - DNA, 234 bp, Lilium asiatic
  unsure (1)..(234): unsure at all n locations
  Clone ID: LIB3230-045-P1-K1-E6
gaagtaaggcgagnngtttgaggannagaaatatgttttgtgtgagttgagtctcgttcattgtaccacaagagagtgtatttttataagagtacatagtgctcatgtgctactgatgttacttatttcagctgtgtttgtacaatcgtgaaaatgtgcccgttacagtagtatcaatctctctaagctgtagaagaggatagtgatgatgtttcaagggtatatcacttcctt

SEQ ID NO: 5671 - DNA, 396 bp, Lilium asiatic
  Clone ID: LIB3230-045-P1-K1-E9
gatgctgggcttaccggacgcaagattatcatcgatacctatggtggatggggagctcacggtggtggtgccttctctggcaaggatcccacgaaggtggaccgtagcggtgcttacattgtgaggcaggccgccaagagcatcgtggccaatggccttgctcgtcgctgcattgtgcaggtatcttatgctattggtgtgcctgagccgctctctgtgtttgtggacacttatggcaccggtaaaattcccgacagggagatactaaagatcgtgaaggagacctttgacttccggcctggcatgatcaccatcaaccttgatctgaagaggggtggcaatgacaggttcctgaagactgctgcctacgggcattttggccgggatgaccctgac

SEQ ID NO: 5672 - DNA, 165 bp, Lilium asiatic
  Clone ID: LIB3230-045-P1-K1-F1
tcggatgctgggcttaccggacgcaagattattatagatacctatggtggatggggagggtacgtggtggtgtcttctttgatggtgcaataaagagccgtacgggcttacattggaggaggcgcagagatgtggcaaggctgtcgtgtgattggcaggttctta

SEQ ID NO: 5673 - DNA, 409 bp, Lilium asiatic
  Clone ID: LIB3230-045-P1-K1-F10
gcccctcgcccctccagccggaaagggaaaaccagcaagagagtgcacttcgtgaagaacttgatcagggaggtggctggattcgcgccatatgagaagaggatcactgagctgctcaaggttgggaaggacaagagggcgttgaaggttgctaagaggaagttgggtactcacaagagggccaagaagaagagagaggagatggccaatgttttgaggaagatgagatctgctggagtttctgagaagaagaaatgatgaagttgcctatcttaagtgaagagctttctggtttgagatttttgttataaaagactttcggttatttttcgtattttactactttgaagcactgttgtagtaaccaacattgaattttgtgttttctagacttgtttggtatggtttt

SEQ ID NO: 5674 - DNA, 411 bp, Lilium asiatic
  Clone ID: LIB3230-045-P1-K1-F4
cctccctacatccgcaaccgcagatgagcaagcgagcagcgcaccgactgaagaacaacagatagatgctccaaatactgatattgtggctcttgctgaggagctccctgacgaaccacctgaagatggagctcatgttcgtatgaatgctgctgcaggccgtctgagggtcagcttcagtgctggggtgaggttctcaagaagagagcctgcagcggaacaacaacaggcaccagtccttaatgctccgaggcgaatggacgaccgcttgtttacctgggcggcggttgcactgaccattgccatcatggtccttgtagtgaagaagttcctgaagtccaatgggattgctggctacttcgatgactcaccttttgagatgtgagagtgaagagagccagggatgattat

SEQ ID NO: 5675 - DNA, 409 bp, Lilium asiatic
  Clone ID: LIB3230-045-P1-K1-F5
cggacgcgtgggccagtcctttaattacattgacgacagtgctttcctgtcggggatcctggaagagaaggagcagcagcccattaagcaatccaatctcctgaatctgcaccctgctgtcaagtctttcatgccatatggaggagcggggatgagtttccagtctgatcagggaagtaactctttggactattcgaactttggctgggaacacgaggtgaaggctgctgatatcacctcagttctttcttcgacaatggaatccgagctcttccaggttgctgctccagcaaagaaaatgaagaataatggggtcggtgtgggtgctgtggagaatgtggctgctgtggacaacaatactctcaatttcgatggcgaatttcctggcattgatacatttatgtttgat

SEQ ID NO: 5676 - DNA, 403 bp, Lilium asiatic
  Clone ID: LIB3230-045-P1-K1-F6
caatgacaagggtgaaggtgttgttgcacatgatgctatgtgcacagcctgtgagatggcagttgtctggatgcaaaatcagcttcgccggaatgagacacaggaccaaatacttaactatatcaatcagctttgtgagcgcttacctagtcctatgggagaatcagctgttgactgtgctagtcttgacaccatgcctaatgtctcattttcaattggtggcaaaacttttgagctgacaccagaacagtacataatgaaggttggtgagggacctgcagctcaatgcattagtggattcacagctatggatgtaccgcctcctcgtggtcccctttggattttgggagatgtcttcatgggtgtctaccacaccgtctttgactatggtaaaatgagggtt

SEQ ID NO: 5677 - DNA, 344 bp, Lilium asiatic
  Clone ID: LIB3230-045-P1-K1-G1
gcctcgtcggcgagtgaggaatccgagaggttaccggcgacgatgtcaaactcgaactcgtcgctggattgatcgttctcagcttcgtcgtcggcggcggcggcggagatccgagattcagagtcctctttcttcatttggaaaagtgtggttggtggattgtgtgtaaagcagagagatgtggtgctaataaaaggaggggagtgacacacgcgcgtcacaagggatttccttgatgcggcgttcgtttttctaagtcaaagaggtgggggggtgttttttaaggaacaaccttttttacgcagaacggattatgccatgtgctaagtaacattggtttcaac

SEQ ID NO: 5678 - DNA, 410 bp, Lilium asiatic
  Clone ID: LIB3230-045-P1-K1-G10
gccgggggaggcgggcccgtttattttcttggcggattcaagcttcgaggattaacaaatggcggagatcaagaccaggcgcgtgcagtaccctactggctgggagcttatcgagcccactcttcgcgaactggagtcgaagatgcgcgaagctgagaatgacccacacgatgggaagaggaagtgcgaggggttgtggccgatcttcaagatcgcccaccagaagagtcgatatatatttgacctgtattatcggaggaaggagattgataaggagttgtacgaattttgtctggatcaaggatatgctgaccggaatttgattgcgaagtggaagaagccaggatatgagcgactctgctgtcttcgatgcattcaaccttgagatcacaattttgcgaccacttgtg

SEQ ID NO: 5679 - DNA, 196 bp, Lilium asiatic
  Clone ID: LIB3230-045-P1-K1-G11
gacggcggtggctgttccgactcatctacttgccggatccattcttcgagaatggacaaatgccgaatatcaagaccagccgcgttcagttccctactggctgggagcttatcgagcccattttttgcgaactggagtcgaatatgcgcgaagctgagaatgacccacacgatgggaagaggaagtgcgcggggtt

SEQ ID NO: 5680 - DNA, 156 bp, Lilium asiatic
  Clone ID: LIB3230-045-P1-K1-G12
tcttgctcttgggggataatgaacaatttaatctaccagtaaacaagaaagaaggtgtttgtaccatatatgtacaccagtggaacaactggtgaccctaagggtgtaatgattttcaacaagaatatcattactcttattttttggtgttgattc

SEQ ID NO: 5681 - DNA, 404 bp, Lilium asiatic
  Clone ID: LIB3230-045-P1-K1-G2
cggacgcgtgggctctgagcccaacggccaattttatgtgacactaaacgggtctacgcataacgaaatcaaccatgataacatgttcaaaatagagaaagcaggtgctttgggctacaaactgctatactgccccagtgtagccggcgtacctgccgatggtccttgcggtagtctggagatatacttcgaggatgggaacaggtggttggttctcagcgaccagccgttcttggttgtctttgtcaaggcataaaccctcgcgcatatgcctattacgtacttggagtctcgtgaaataagggccttacgtccgtgtctgctaggcgtatcagtacgaggagtgtcatctaataagggcttttaagtcccagtgtttgctatgtatatcagtgcgtggagtg

SEQ ID NO: 5682 - DNA, 396 bp, Lilium asiatic
  Clone ID: LIB3230-045-P1-K1-G4
actccctctccgtccgtaacggcgaggtcgtccttgctcccaccaaccctagagacgagtaccagcactggattaaagacatgaggttcagcaacaaggtgaaagatgaggagggttttcccagctttgcacttgtcaacaaagcgactggccaggctatcaagcactccgttggaccgtcacaccctgttcgcttggcaccctacaaccctgagtcctttgatgagtcggtcctatggtcggagagcaatgacactggtgctggctatcgatgcatcaggatggcgaacaacatccgcctcaacttcgatgccttccacggtgatgaggatcatggtggtgttaaagacgggaccactgttgtcctttgggagtggctcaaagggaagaaccaga

SEQ ID NO: 5683 - DNA, 413 bp, Lilium asiatic
  Clone ID: LIB3230-045-P1-K1-H11
gaaatagattggtatccgggcttgtgtctgacccagaaggttttggtaaagaagccaagaaagggatcaaaaaacacaaagcccatcacaaaaacagagaaatgtgaaagtttcttcaacttctttaacccaccacaagtccctgatgatgatgatgatattgatgaagaaactgctgaagaactacagactcaaatggagcaagattatgacattgggtccactattcgagacaagatcatccctcatgcagtttcatggttcactggagaggctgctcaagatgatgatttagaggacctggaaatggatggacttgaagatgatgatgacgaggaagatgatgaggaagacgaggaggatgatgatgaggaggatgacgatgaggatgacgaggaggatgaagaggaggg

SEQ ID NO: 5684 - DNA, 406 bp, Lilium asiatic
  Clone ID: LIB3230-045-P1-K1-H2
atctgatattcgtagccgaatgcaacctttgaaggatcaccttattcaggcgatcaatcacctccatacagtctttcaggttcatgtgtttacagcattatgccgaggctactgggaccggatggggcaggatgtgcttaatttcctggaaagtaggaaagaaaacaagtcttggtacaaaggtgcaagggttgcagtttctatcttggacgacacatttgcatcgcaaatgcagcagctgctcggaaatgctgtgcaagcgaaggatctggaacctcctagatcggttatggaggtccgctcggtgctctgtaaggatgcagcgaacatcaaggactcaagtttctactattgagttgtgaaaatgggtccagctatacgagtatgggcaaagagtctctctact

SEQ ID NO: 5685 - DNA, 407 bp, Lilium asiatic
  Clone ID: LIB3230-045-P1-K1-H3
cattgattagcttttttaatagtcttttttcacttacccgaagtcatgcatgattccaaatacgcacttggttgggcaacataatacatatatatttgtatctatatatgtatggatcacctaatctcgtaggagggaagacagacgatattacggaattggaaaaatatgggttagggggtcaagtcaaactagatatatgtaatgtctataagtctaacccttacatatgtttcgaagaatgattctaaaatccaattcaatataaaaataaaatgcaggtggtttacattatggaagaaacaaatgtatatgtgatattagatatttactagttatatagggattatccctatggactatatattatatatttttatattttatttattcctatttctttccca

SEQ ID NO: 5686 - DNA, 419 bp, Lilium asiatic
  Clone ID: LIB3230-045-P1-K1-H5
cttggttatggcaactgggatgaactgtttctgctttccgcacttcacccttgtttcgctttgactggtttgtgaagtcccggacaactcaagaattggcgaggagatgtgatacccttatcaggctggtggagaaagaaaatcaagaatttgatgagcgtgaacggcaagctcggaaggataaaaaacttgctaagaatctgactccaacaaagcgctccatagcaaagacatcagcaccggaaagccctgcaccaacttctttcaagaagcggaagcaatcctctatggatgactttgtgagctcaggtcggcgaaagaagtgatagaaggtgtgttctcttgtttgtgggtcaactgaagaagtgatcggttgcagctttgatgctttttggcgctggagaactttgctggtagct

SEQ ID NO: 5687 - DNA, 275 bp, Lilium asiatic
  Clone ID: LIB3230-045-P1-K1-H6
ctcaattctctcagatctctcactaatggcgcccaaggccgagaagaagcccgcggcggagaataagccgtccgtttaggaggtttatatgtcttttatttatttattatattttttcattttttttatattttttatttttatttttctttatttatttttttttttatattattttcatttttatttattttttttattattattttatcttattatttttacattttttttaaatatatatttatttatatttatttattttttattttttt

SEQ ID NO: 5688 - DNA, 399 bp, Lilium asiatic
  Clone ID: LIB3230-046-P1-K1-A10
gtgagtttgttgagagatgctaagaagtccaacacttcgaagggtgttgatgaccgtagtggatcaaatcagccaatccgtagcggtagatagctcaattttgttgacgacaatttcttcagggccatgatgtttcactatttcttcgagttaatgcgagattcacactccaaccacaccaccgcttgatcttttgtagatgtcacatattttctttttcacccttttagcaaactcatactatcacatcaaatattccatgaaagactccccttaatatttcaaacaccttatagggaggataaacacaccgactgccataagtatgcaacaccacactactacccgacaccgtagttttttccaacaccacaatgttcctttaaaaagctgatttca

SEQ ID NO: 5689 - DNA, 405 bp, Lilium asiatic
  Clone ID: LIB3230-046-P1-K1-A11
gacgacttaaagtccctccagagcgtggggcagattatcggagaagttctccgaccgcttgataatgaacgcttgattgttaaagctagcagtggcccaagatatgtcgtcggctgcaggagtaaggtggacaaagagaagctaacagctggaactcgtgtggttcttgacatgactacactcactatcatgcgagctctcccccgtgaggttgatcctgttgtatataacatgcttcacgaagaccccggaaatgttagctactctgcggtcggtggtttatcagaccaaattagggagctcagggaatccattgagctgccattaatgaatccggaactcttcctcagagtggggattaagccttcaaagggtgttcttctgtatggccctcctggaactgga

SEQ ID NO: 5690 - DNA, 409 bp, Lilium asiatic
  Clone ID: LIB3230-046-P1-K1-A12
cgccacctccgccgacctcaaacccgcctaccttgccatcaattcgcccccaaactccaccaaaagcaagcacaagtcatctttctcctttcccccaagatcccgacccggattgcaaccttaatcactctcaacccccgataccccgaccaccaacactgctccgctgcctccttcatcggaaaccacaggtatgtctccatgtctttttactttcttttttactaatttattttcttatgtatgttcgatcaattgggggctttttcgggaaattagggcatgaatttggggaatgagggattgggctcaagagaaaaaagggtgctgctgctatttgacggaattttggcgtgaatcagatttctaatttggaatttaagtgtgagttcttttggattctcaattt

SEQ ID NO: 5691 - DNA, 418 bp, Lilium asiatic
  unsure (1)..(418): unsure at all n locations
  Clone ID: LIB3230-046-P1-K1-A2
aaaaaaccnaaaaaaaaaaggagaaaaaaaaaaaaagaaaaaaaaaaaaaaagaaaaaagaaaaaaaaaagggaaaaaaaaggaagaaaaaaaacaaaaaaaaagagaaaagaaaaaaaaaaaaaacaaagaaaaaaaaagaaagaaaaagaaaagagaaaaaaaaaaaaaaaaaggaaaagaaaaaaaaaaaaaaagaaaagaggaaaagggaaggagaggaaaagaaaaaaaaaaaaagaaaggagaaaaaggaaaaataaaagagaaagaaaaggaaagggaagaaaaaaaaaagaagggaagaaaaagaaaaagaagagacaaagaaaaagaaaaaaaggagaaaggagggaaaaaaaaagaagaagaagaaaaaaaagaaaaagagagaaaaaaaaaaaagaaaaaagggaaa

SEQ ID NO: 5692 - DNA, 420 bp, Lilium asiatic
  Clone ID: LIB3230-046-P1-K1-A4
cggacgcgtgggcggccgtaatgtcggaagagaaggaatccacgtcggtcccgctgagccaggcagtagatcccgaagaccccgccaagtctccgccagcctcccccaattcctccactcgaaaggcttgctgtgctgttctccaaagctgggtgtcaaaaaagtttatgactggatgtgtagttctctttcctgtagcagttaccttcttcatcacatggtggtttattcagtttgttgatggcttcttcagtccattatatgcgcagctcggtgtcaatatttttggcctaggatttttgacatttcttattttggtctttctcgtgggcatatttgattcatcttggcttggttccacttgttttttggattggcgaatgggtcataaagagggtgcccttaatgaagcccatatat

SEQ ID NO: 5693 - DNA, 112 bp, Lilium asiatic
  Clone ID: LIB3230-046-P1-K1-A7
ggcactcgaccttacatatggcggacatttttcatcatggcctaccatgactgaatcgaagaagatatagtgttgttatccattttcatttgagacaagcgccattattgta

SEQ ID NO: 5694 - DNA, 456 bp, Lilium asiatic
  Clone ID: LIB3230-046-P1-K1-A8
gtacgggtccgccactacgccgtgtcgagccacgcgtagggactgaacattgctgtggtggatccagatgtggctctggaggaggccttggccaatgagtccatcatcagaagtttaagcatgttctctgatctctgttcgacctcaattcccggaaaccctttgtcagcgatcgaccgatttctgtccatctttagcgacgtagcgaaatcgagcgccatcgccgaatcactcgctgccagccgcaaaagcaatgcaaccgacaatgatgtgttcactgaatgcgggaaatccacatctctctgggtcgatgcagcattagccaccaacctagaaattctctctttactccaatgtggtactgaaacttcattgagaggtgttgtccccgatcatcgcatgaccaagagggtttatgttaccgctcctgccaaaatccaaccaaagattataact

SEQ ID NO: 5695 - DNA, 410 bp, Lilium asiatic
  Clone ID: LIB3230-046-P1-K1-B11
cggacgcgtgggatttcgaggagtttagtcttccttacttgaagcacatcgtggacgatgttaaaaagacacatccagaccttcctttaatcctatatgcaagtgggtctggtggcttgctcgagagactacctctgacgggcgtcgatgttgtgagcttagattggacagttgatatggccgaaggtcggaagcggttagggtccagtgtagctgtccagggaaatattgaccctggagttctctttggctcgaaagagttcatcgctaagcgaattcatgatacagtgagaaaagcaggtaataccaagcacattttgaatctcggacatggcattgttgtagggacacctgaagagaacgttgaacactttttcgaggttgccaaagggatcaggtaccaagtctag

SEQ ID NO: 5696 - DNA, 426 bp, Lilium asiatic
  Clone ID: LIB3230-046-P1-K1-B3
ctgggatggccttccgagttccaacaccaaatgtatctgttgttgatctgactgtcagacttgagaaaagcgcttcatatgatgatgtcaaatcggcgattaattttgcttctgaaggtccgctaagaggcattcttggatacacagacgaggatgttgtttctaatgattttgttggcgatacaaggtctagcatctttgacgcaaaggccggtattggactgagctcttcattcatgaagcttgtgtcgtggtatgacaacgagtggggttacagcaaccgggtgctggacctgattgagcacatggccatggtatcggttcgcaactgaagtttgccggcaaagctactgagttcgggattttctttttgttcatctctggggttcgttggtgtaagggaggcaaaattttgatcgggctgtt

SEQ ID NO: 5697 - DNA, 421 bp, Lilium asiatic
  Clone ID: LIB3230-046-P1-K1-B4
gaaagcgatctccaccgacgagccacgatcgatctccaccgtcagcaagtcgatccacctccgatgaagctcttctacgccaaccaccgaagacatcgtccacgactccaacgacaatgagatccaccgatgaagctccttcgacccctgtcgtctgatgcatccattaccctaccatccatcctctacgccgtccgatgagtcgatcctccaccgtcgatcaagacgtcttcactccactttgacatgcatcctcgtcgtctgtccgatctacctccactgatctccaccgtctacatgtaagcctatctgcaccattcgatgagatctgaagccacttccaccattcgatcatccggaagcatcaaaaacccatacttccctccgattttgccaaagaaggtaatgatttcaaattttt

SEQ ID NO: 5698 - DNA, 393 bp, Lilium asiatic
  Clone ID: LIB3230-046-P1-K1-B5
cggacgcgtgggaactggttgttttaggagtacacatctccaggaactttattggttcctgtaactgcgagtgagatggtgaagttgacaataatagcacgtgttacggatggccttccattagcagaaggattggatgatggtcgtgatcaggacattgagttctataagcagcaagcgaagctgctcttcaagaacctttctaaaggacacattgaggcttcaagaatgtcaattgagactggtccttacttttttcattatataaattgaaggccgtgtttgttatttgacaatgtgtgatcgttcctacccaaagaaacttgcttttcaatacctagaagacctaaaaaaatgagtttgagaagggcttgggggagtcaaaattgaaac

SEQ ID NO: 5699 - DNA, 402 bp, Lilium asiatic
  Clone ID: LIB3230-046-P1-K1-B7
cctcctcctcgatgttgcgccccttactctagggattgagactgctggtggagtgatgaccaagttgattccaaggaacactgtcatcccagctaagaagtctcaagttttctctacgtatcaggatcagcagactactgtttccattaaggtgttcgagggcgagaggagtctcacgaaggattgcaggctgcttggaaagtttgatctatctggaatccctccagcacccaggggtgttcctcagatcgaggtcaccttcgaggtcgatgccaatggcatcctcaacgtgaaggccgaagacaaagcatctgggaaggcagagaagatcacgatcaccaacgagaaggggtggctcagccaggaggagatcgaccgtatggtttgtgaggcataagagtt

SEQ ID NO: 5700 - DNA, 418 bp, Lilium asiatic
  Clone ID: LIB3230-046-P1-K1-B8
gcttgagccagcagcagcagcgatggcggcgatcacactgagcagcgggttcaagatgccgatcatcgggctcggcgtgtggaggatggagggcaaattaatcagagacctcatcctctcctccatcaagatcggctaccgccacttcgattgcgcagctgattacaaaaatgaagctgaagttggtgaagcacttgcagaagcatttcaaactgggcttgtcaagagggaggatctttttattaccacgaagctctggaattcagatcatgggcatgtcattgaagcatgcaaggacagcttgcagaaactgcggctagattatcttgatctttacctagtccactttccagtagcgacaaagcacactggagttggaacaactgatagtgctctcgatgaacatggtgtacttgac

SEQ ID NO: 5701 - DNA, 179 bp, Lilium asiatic
  Clone ID: LIB3230-046-P1-K1-C10
cggacgcgtgggatttcgaggagtttttatttccttacttgaagcacatcgtggacgatgttaaaaagacacatccagaccttcctttaatcctatatgcaagtgggtctggtggcttgctcgagagactactctttacggtcgtctatgctgtgagcttagattggacagtcgttatg

SEQ ID NO: 5702 - DNA, 258 bp, Lilium asiatic
  Clone ID: LIB3230-046-P1-K1-C11
attatctataaacacttgactaatagcggttttatgcaaaaaaaaaaaaaaaaaaaaaaaaaaaaaaaaaaaaaaaaaaaaaaaaaaaaaaaaaaaaaaaaaaaaaaaaaaaaaaaaaaaaaaaaaaaaaataaaaaaaaaaaaaaaaaaaaaaaaaaaaataaaatttatattaaaaaaaaaaataaaaaaaaaaaaaataaaataaaataaataataatatggttaaaaccggggcttgtggagatttatgtaatt

SEQ ID NO: 5703 - DNA, 412 bp, Lilium asiatic
  Clone ID: LIB3230-046-P1-K1-C12
cggacgcgtggggacaagcaactggatgcagagattcataggaagtatatctttggaggacatgttgcctcttacatgaggtctctgattgatgatgagcctgagaagtatcagactcacttttctgaattcatcaagagggggattgatccggatcagattgaggagatgtacaagaaggtgcatgctgctatccgtgaagatccgacaatagtcaagtccaccaagccaccaccaaaggagcacaagaggtacaatttgaagaagctgacctatgaggagaggaaggctagccttgtcaagcgtttgaatgccctcaatgatgccaacaatgatgaagatgatgaggatgatgattgagcttttgttaaaccgactttaaattcatagtttgtctggagagttgaacttg

SEQ ID NO: 5704 - DNA, 429 bp, Lilium asiatic
  Clone ID: LIB3230-046-P1-K1-C2
tcttcttctacttggccgagaacaatgttttgttcgaggggatcctactcaagccaagcatggtcacgccaggtgcggaatgcaaagaaagagctacacccgagcaagttgctgactacaccttgaagcttctaaagaggagaatcccacctgctgttcctggcatcatgttcctgtccggtggccaatctgaagtcgaggcaacattgaacttgaatgccatgaaccagagccccaacccgtggcatgtttcgttttcctatgcgagagctctgcaaaacacctgcctgaagacatggggaggcaggccagaaaatgtgaaggctgctcaagacactctcctggtgcgagcgaaggcaaattccctagctcaacttgggaagtacaccggtgagggagagtctgcggacgctaaagaaggcatgttcg

SEQ ID NO: 5705 - DNA, 210 bp, Lilium asiatic
  Clone ID: LIB3230-046-P1-K1-C3
tattcttctacttggccgagaacaatgttttgttcgaggggatcctactcaagccaagcatggtcacgctaggtgcggaatgcaaagaaagagctacactctagcatgttgctgactacaccttgaagcttttaaagaggagattcccacctgctgtttctggcattatgtttctgtctggtggtcaatctttattcgaggctatatttg

SEQ ID NO: 5706 - DNA, 415 bp, Lilium asiatic
  Clone ID: LIB3230-046-P1-K1-C6
ggaccatgctaaatggtcacctgctgcaactgttaccttcatgtatgaacccgaaattcatatcaatgaaagtctgatggaaaccttgaccctggaagagaaaacaagctgggtagaaagcagccctactaaagtttttgacatcgaccccaaaaccgagcaggttgtggtcgtggatcctgaagcgtatacttacgacgatgaagtgataaagaaagcagaggctatggggaaaccggggcttgtggagatttatgccagagaggacagctttatcttcacagttgaatcaaccggggccatcactgcctaccagatggtgatcaatgcccttgacgtactgaggcagaagctggacggagtccgcctgcaagatgctgatttgggcgacttcactgaactgaccaagcatata

SEQ ID NO: 5707 - DNA, 405 bp, Lilium asiatic
  Clone ID: LIB3230-046-P1-K1-C8
gctggtacaggccttcctattaacaggttcgctacatcagatgcattgggatttatagcaccaatgaggaacagcatcgatgcagtatcagatcgtgatttcgtactggaatttctctctgccaattccattactgccattcatctttcaaggcttggtgaagaatgggtaatgtgggcatcagaagaatttgggttcttgaccccaagtgactcagtttctactggaagcagcatcatgccccaaaagaaaaatcctgaccctatggaacttgttcgtggaaagtctgctagggttgtcggagatcttgttacacttctagtcctttgtaaaggactacctcagtcctacaatcgtgatctgcaggaagacaaagaacctctttttgatagggctaaaactatc

SEQ ID NO: 5708 - DNA, 410 bp, Lilium asiatic
  Clone ID: LIB3230-046-P1-K1-D11
ctaggaggcagtctccagactcaccaccttccaaaagcaaaccttcaattgaccatcatgcaagcaaacctgttcattcaccgacacctacctatgatcgtcagcaaagatcaccatatcaggatggtgaaggtaaggaggctcagcatgatccttctcccagtccgttgaaagaaagacccagttccccatataattgcaatggtaatggtaataatggaggtcgtggaggatcagccagcccagctcagtcgggccatagggtatctccacatcaccttggtgatgatgctgaaggggggacagtcaaggggcctgttcaaatgcccttgttatgtgccaataatggggaagaagaagaggaaggcatgattccgacggacgaggatgaagctatgatcacccatggt

SEQ ID NO: 5709 - DNA, 412 bp, Lilium asiatic
  Clone ID: LIB3230-046-P1-K1-D12
cggtgcggaatacacgaatcgaacaaagcgaaagaaaggaggaagacaacagactaaccatctatacaaaagcaaacggggaaaatgaccatcatgcaagcaaacctgaacataaaccgacacctacctatgatcgacagcaaagaccaccataacaggatggagaaggtaaggaggcacaacaagaacctaaacaaagacagatgaaagaaagacccagatccccatataaaaacaaaaggaaatgaaaaaaatgagaggtagaggaggatcagtcagtccagaacaaaaaaaacaaaaagaaaagaaacataaacaaaggtaacgatgctagaagggggaacagtcaagagaaacagaacaaaaaatcaaaagaaaatgagccaaaaaaaggaggaagaagaaagaggaa

SEQ ID NO: 5710 - DNA, 73 bp, Lilium asiatic
  unsure (1)..(73): unsure at all n locations
  Clone ID: LIB3230-046-P1-K1-D2
actagaggaaccaagcagacgtacgcgngcacgcgacgacatagcgggacaataggggcacctaaattcaatt

SEQ ID NO: 5711 - DNA, 288 bp, Lilium asiatic
  Clone ID: LIB3230-046-P1-K1-D3
aaaaaaaaaaaaaaaaaaaaaaaagaaaaaggaaaaaaaaaaaaaaaaaaaaaaaaaaaaaaaaaaaaaaaagaaaaaaaaaaaaaaaaaaaaaaaaaaaaaaaaaaaaaaaaaaaaacaaaaaaaaaaaaaaaaaaaaaaaaaaaaagaaaaaaaaaaaaaaaaaaaaagaaaaaaaaaaaaaaaaaaagaaaaaaagaaaaaaacaagaaaaaaacaaagaaaaaaaaacaaaaaaaagagagaaagaaaaaaaaaaaaaaaaaaaaaaaaaaaaaaaggaaaaaa

SEQ ID NO: 5712 - DNA, 371 bp, Lilium asiatic
  Clone ID: LIB3230-046-P1-K1-D7
cggacgcgtgggtgttgatgacaaaacagaggatcctgataaagatcattcaacaaattctcatgctgtattgtacaaattggagactattaacatccagttggtttctgcatacggaaatcagaacgaagtaaaaattcaagattttcgtaaggctcgagccgatgttattgcacattctgcagtcaacattatatctcgtctaaaagctggtggagaggcgacaatacaagccctaaagtcactttgttggagacaaaaaagtattcaagtggaggaggtggtgctctctggagtggatagtcttggttttgacctgagagtttgctcaggaacacaagtgcagactttaaggtttgcattcaacacac

SEQ ID NO: 5713 - DNA, 415 bp, Lilium asiatic
  Clone ID: LIB3230-046-P1-K1-D8
cagccagctccccaccacagtttctcagaggaagtcgctgtgctcgacaaatacttcggtcacctccagtctggtggaaatgcttacatgattggtgatcctgttatgcctgaacgcaactggcacatctattatgctactgacaagcctgagaagcccatggtgactcttgagatgtgcatgactggcctgagcagcgacaaagcatctgtcttcttcaagagttctgctgatggccacactcgctcggccaaggagatgactaatgtttctggtatctcaaacatcatccctgagatgaatatatgtgactttgaatttgacccctgtgggtactccatgaatgggattcatggttcggctctatcaaccattcatgtgactccagaggatgggttcagctatgcaagttacg

SEQ ID NO: 5714 - DNA, 330 bp, Lilium asiatic
  Clone ID: LIB3230-046-P1-K1-E1
gaatcttgtgggttgacaggctccctttagatctactcgtccgaatcgcgcctccaacgtcgtaagcccccttctccttcaatctcttggaaccctagatctgatcgccgggtcagcttctaccaattctgaatcaacgagagtgaagatggggctgtctttcaccaagctgttcagccggctttttgccaagaaggagatgcggattcttatggtgggtctcgatgcagctggtaagactacaatcttgtataagctgaagctgggagagatcgtcactaccatccctactatcggatttaatgtggagactggggaatacaaaaacat

SEQ ID NO: 5715 - DNA, 249 bp, Lilium asiatic
  Clone ID: LIB3230-046-P1-K1-E2
cacgaagctgctgaagctaaacctacgatctggaaaaaatggctaccaaaatcgcgacacctagcttgaagaaggcgaatctactggacccgcaatccatcaagcacattctcgacgaattaatagctgagatcgtgactggtagagggtattccgaggattttaggtcgtgcaacttgaagctgtttatcgggacggtagccatagtcctttgccttgttgcgcagatttacccgaagaatttaccgg

SEQ ID NO: 5716 - DNA, 411 bp, Lilium asiatic
  Clone ID: LIB3230-046-P1-K1-E4
ttgggggacagttctttccagagttggctgcaaagttgaggccacctatagcgcctgttcaacgtgggcggcaggctgctaagagaacaatttatgtgtgcggacgccctcgttgggtgtttgtcttgatattctctgcagccagttcctttgtgtggttaacttcttgtagcctccttactgttctctgggcgcttcttattggtcttcttgcaactctgcttcatgccagctttagaacacctaatctaaaagcacgcttgaacaccgtccgcgaggagtttcgtgcggtatggcgcaattatggtgagctgtagctgtgctaaactggaagcaatatgttgtgagcagtctgcaggactttacttctatgggactttgatatgctacttttgtttgaaagctgatgtg

SEQ ID NO: 5717 - DNA, 80 bp, Lilium asiatic
  Clone ID: LIB3230-046-P1-K1-E5
tggtgacaccaggttcagatgccccgaaggttgcacctgaggtgatcgctaaatacactgtacgcgctctccagcgcact

SEQ ID NO: 5718 - DNA, 409 bp, Lilium asiatic
  Clone ID: LIB3230-046-P1-K1-E7
caaagctcaagaaggaaaagagatgttgcaagcttgatgaggatgtgctctcggatctataagtacccctcctcccccattggattggaaagaggtctcactccggcccgagtgggggagggcacattgttggccgtctttctctaggttttggaggaggcacattgggagagcatctacaagtgatttcggagtggagagttcatcatggttcttatttgtggatctttgttgagctttgagagagtcatgtaagtggagtttgtaaggtttgagtcttattttatgatgagtttttggttcggatttgtatacattcaaggatggccaaggcctataatgggatttgagttcttgtgttgatcttccattgtagtttatttaaactttcatcaatgaaatgctttta

SEQ ID NO: 5719 - DNA, 417 bp, Lilium asiatic
  Clone ID: LIB3230-046-P1-K1-E8
acatgacccatgtttatgatttctacaagcccaaccttgcaagcgaatatccggttgttgatgggaagctatcacaaacatgctatctaatggcacttgattcgtgctacaaacgctattgtcacaagtatgaaaagttagaggggaagcagttttcactatctgatgctgagtatttcgttttccattctccgtacaacaagcttgtccagaaaagttttgcacggctgtacttcaacgattacctgcggaaggccagttcgattgaggaggacgcaggagagaaactgaatccattttcaaccttaactggtgatgaaagctaccaaagtcgtgatcttgaaaagacttctcagcaagttgcaaaaaaactgtatgacactaaggttcaaccttctactttgttaccaaaacaag

SEQ ID NO: 5720 - DNA, 411 bp, Lilium asiatic
  Clone ID: LIB3230-046-P1-K1-E9
atggtactcatggaggcaccagatgatcgccgttgcagacgccggatttcgagcccttgctcctgacttccgcggctacggcctctcggaccagccaatccagcccgagatcgcctcctgggaagatctcatcgccgatctactctcaatcctcgactctcttgccatccccaaggtgttcattgttgggaaggattttggagcgaaatcagcatatgattttgcacttcggtacccagaacgggtgctaggagtcatcaccatgggcgtgccttaccttcccaagggcttagccttcgagtcccttcccgaaggcttttacatattgaggtggcaggtgcctggacgagcagaggcggattttagtaggctggacataaagacagtagtgcgtaacatctatattctgtt

SEQ ID NO: 5721 - DNA, 227 bp, Lilium asiatic
  Clone ID: LIB3230-046-P1-K1-F12
atatattccctaaccgggtaatgggaatcaacaatccattcttctccatttgtctctcttaacattttatcgagcctaattttcgaaattgtggttccgcaatccgcaattgtgatcgtgaatcctaaacttctgtgcaagattaatgcggtgctgcattaacaaaagacattgccgccgcaattgtagtttgcaaccgatatcaactgcaacatgacccgaatttg

SEQ ID NO: 5722 - DNA, 169 bp, Lilium asiatic
  Clone ID: LIB3230-046-P1-K1-F2
cggacgcgtgggcggcaacggagtgggggatgagaaaggcgttgctgcgcttccgagattcttcctttccttgtctaacaaggagaaggaggaggatttcatggcgtttaaaggctgtaagctgtcttcattaccttaatttttttataatttatttagaaatctatac

SEQ ID NO: 5723 - DNA, 404 bp, Lilium asiatic
  Clone ID: LIB3230-046-P1-K1-F5
cggacgcgtgggcggacgcgtggggccggctgatgctgcagctgttgataccggtggtgaagttagagttgagaacgagttgttgcattttgaaatgccggtgtacatcgaagcatttgtggcgaagatatatgatgatctagcagcgccggcgctgagaatatttgacctgccttcaccgcctagggttttcaaagaatcaacgcggagcttgttcgacagcagtgctgacctcgacttcgggttatcggagcaggcaatattcaagcagtcggcatcaatattcgatgatgatggtatgaacctcgactttctcacaagcgattggttacttgggtagggtttcgacggattcgagtcgtcgacatggcagcagacgtcgacatcatggcagacagaggact

SEQ ID NO: 5724 - DNA, 406 bp, Lilium asiatic
  Clone ID: LIB3230-046-P1-K1-F6
aggaaaccctaacctggtgcatgcacagagcatcctcgcaatctgggccgtgcaggtggtgctgatggggttcattgagggttacagaattggcggcgggccactaggggagggactcgacccgttgtacccgggtggagcgttcgaccccctagggctggctgatgaccccgatgcgtttgcagagttgaaggttaaggagctcaagaacgggaggttggctatgttttctatgtttgggttcttcgtgcaggccattgtgaccgggaaggggccggtggagaatttgtacgaccaccttgcggatccggcgaccaacaatgcgtgggcttatgcaaccaacttcgttcccggcaagtgagggtttcatgttcatgtatccatgtatgtgttgtaactttgattt

SEQ ID NO: 5725 - DNA, 413 bp, Lilium asiatic
  Clone ID: LIB3230-046-P1-K1-F7
gctggtacaggccttcctattaacaggttcgctacatcagatgcattgggatttatagcaccaatgaggaacagcatcgatgcagtatcagatcgtgatttcgtactggaatttctctctgccaattccattactgccattcatctttcaaggcttggtgaagaatgggtaatgtgggcatcagaagaatttgggttcttgaccccaagtgactcagtttctactggaagcagcatcatgccccaaaagaaaaatcctgaccctatggaacttgttcgtggaaagtctgctagggttgtcggagatcttgttacacttctagtcctttgtaaaggactacctcagtcctacaatcgtgatctgcaggaagacaaagaacctctatttgatagtgttaaaactatcagaggaat

SEQ ID NO: 5726 - DNA, 211 bp, Lilium asiatic
  Clone ID: LIB3230-046-P1-K1-F8
accacgcgtacgcccacgcgatcgaccacgcgtacgcccacgcggacgactaatactagacctgactatcgatgatcgtcgtaacaccattatgagccaagacaaacgagaaggagatcacgaggctatacgggtagatatagcttaaggatgagaaaatcaggaaggcggacaagaacaagcaggcgaagaacttatagagagtcggaag

SEQ ID NO: 5727 - DNA, 251 bp, Lilium asiatic
  Clone ID: LIB3230-046-P1-K1-G10
aacctccactcccatggcgagctccgtctttcaccatttttctccgccctactggcgcgagcttgcaccgccaccaccagcttctcaccacctgcaacccttggtatttgttcaggtcttctggggactggataagaagcttgctcagaggaaacattttccattcgtgaattggcttatttcttattcgaagtactctaaggccttagaatttttctatgagatatttgatccagattttcattgtcatt

SEQ ID NO: 5728 - DNA, 290 bp, Lilium asiatic
  Clone ID: LIB3230-046-P1-K1-G2
ggggggtgttgctaaaggcacaacccaaattcaaaatgttttgcttacacatggatgcgactccaatacatatggtactggtattaaagtatccgatagggatacaccacccttttgtaagttgccatagttcataggtcaatttgcttataataaccgaaaatgacacaactttagtcaatatgcttgatattaaccaaatgaaattatgtcattagacaaagtgactgatcttacccaactaaaaattgatacatggtgattgccaaattgcttattacataaaagca

SEQ ID NO: 5729 - DNA, 411 bp, Lilium asiatic
  Clone ID: LIB3230-046-P1-K1-G4
cccacgcgttcgcccacgcgttcgaccacgcgtccgcccacgcgtccgactaatactgcacccgtctatcgctgatcgccgtttacaccaatcggagccatgacatcgaagaaggtgatcacgaggcaggagtgggagaaaaagctcaaggatgtgaaaatcaggaaggaggacatgaacaagctggtgatgaacttccttgtgacggaaggctacgtcgaggcagccgagaggttccgtaacgagtccggcaccgaaccggagatagatcttgctacgataactgaccgcatggcggtcaagaaggcggtgcagtcggggaatgttgaggatgcgattgagaaggtcaatgatttgaaccctgagatattagatacaaatccccagctttattttcatctacaacagcag

SEQ ID NO: 5730 - DNA, 413 bp, Lilium asiatic
  Clone ID: LIB3230-046-P1-K1-G6
gaatcatgtgaaagatacaattagcgatggtgaggagcctgaagatctgggagaaccactgactgcagaggagcaggaagaaaaggatatgctgttagaagagggattttcaacatggtcgaggagagacttcagtacattcattcgggcatgtgagaagtatggtcgcactgacatcaaaagtatagcttctgaaatggaaggaaaaactgaagaggaggttgagagatatgccaaagtcttcaaagaacgatacaaggaattaaatgattatgatcgtataatcaagaatattgaaaggggagaggcaaggatttctaggaaagatgagataatgaaagcaattggcaagaagttggatcgctacaagaacccttggctggaactgaagattcagtatggtcagaacaaag

SEQ ID NO: 5731 - DNA, 298 bp, Lilium asiatic
  Clone ID: LIB3230-046-P1-K1-G8
cggacgcgtgggaaatctctcatcaaatatgttaggccgcggcaagggagggaaggggctcggtaagggcggcgccaagcgccatcgcaaggtgctgcgggacaacattcagggcatcaccaagccggcaatccgccgtctggctcgccggtgcggaatgaagaggatcagcggcctcatatacgaggagacccgaggcgtgctgaagacctttctggagaacgtcatcctgcgaagccgatacctacactgagcacgcgcggcgcaagactgttactgtgatggatgttgtgtatgc

SEQ ID NO: 5732 - DNA, 410 bp, Lilium asiatic
  Clone ID: LIB3230-046-P1-K1-G9
ggcactaccgagctcctgaggttatattgggactcggttggagctttccttgtgatatttggagtttgggctgtatccttgttgagctttgttcgggagaagcattatttcagacccatgagaacttggagcatttggctatgatggagcgagtactgggtcctttgcctcaacatatgttgagaaaagctgatcgacatgctgataagtatattagaagaggccgattgaactggcctgaaggtgccacttcgagagacagcatcaaagctgttaccaagttaccccgcctgcagaaccttgtgatggagtatgttgatcactctgctggagatcttattgacctcttacaaggtcttctgagatatgagccatctgatcgtttgactgctcgtgaagctctgagttac

SEQ ID NO: 5733 - DNA, 336 bp, Lilium asiatic
  unsure (1)..(336): unsure at all n locations
  Clone ID: LIB3230-046-P1-K1-H1
acccacgcgnccgcccacgcgtccgggccccagctgccattccaaagcctgcgcccaaggctgcggcgaagccgaagccggctcctcggccggcgccaaaggctcgccctgcaaaggccgccaagacctccgccaaggacgctcccgcaaagaaggctgctgctccggctaagaaggcattagccccaccaccggctaagaaagcaatagccccaccaccggctaagaaggctgagcccgcgaagaaggctgctcctgcagcgaagaagaaggcggcgactccagcaaaaggagaagccccggctagaaaggcgcctgcgagggagggcggccaag

SEQ ID NO: 5734 - DNA, 411 bp, Lilium asiatic
  Clone ID: LIB3230-046-P1-K1-H10
atcccgtgttggaccaacccgtccgcccgaagttccggcagcagaaccagaggctgttgcggcagctgttgaagagccagctgcagcgccggcagcagttgaagagccagctgctgcggaagctgcagctccggtagaggaaggtaaggtggaggaggtgaaggagtctactccagtgtgattagcatttacgtgcttgtgcgttttgttcggtaagggttttactagggtttgagtataataatgaagggagagagggggctgtgtgttgaagttacgggctattttattaagtagtttggtttatatttgcgggtggtttgagattgaatttgaatttttattaatatgtcactatggtcgcttgtaacgttggattacttatatgttgtaagaaattttatagtttgg

SEQ ID NO: 5735 - DNA, 362 bp, Lilium asiatic
  unsure (1)..(362): unsure at all n locations
  Clone ID: LIB3230-046-P1-K1-H12
aatcccctctcaaatccctctgatggcgccaaaatccgagaagaagcccgccgagaagaagccggtggcggagaagcctgccgccgaggaggagaagaagtcagccccggcagcggcaccggcggagaagaagcccaaggctgggaagaaggtcccggcctccaaggagggcgagangaaagagaaggaggtcgaagaagtcggtggggacctacaggatctacataattaagggggtggagccaggtccacccggccttgggaacctcaagcagggccatggggaccatgaccagcttaattaacgacctcttcgagaggatggctcaggagtctgttggtctggcccgttccaccaggag

SEQ ID NO: 5736 - DNA, 188 bp, Lilium asiatic
  Clone ID: LIB3230-046-P1-K1-H2
aacccggggcgacccacgcggacggagaacgaaagcggacgctcgagaggaaccaagcaaacgaacgcgcgcaagcgacggcacaacacggggatagcgacaccaaaatacaacaaacaggccgccgaacaacaacgacgagacagggaaaacccaggagtaacccaacataaacgactagcatcaca

SEQ ID NO: 5737 - DNA, 415 bp, Lilium asiatic
  unsure (1)..(415): unsure at all n locations
  Clone ID: LIB3230-046-P1-K1-H4
cggacgcgtgggaaatctctcatcaatcatgtcaggccgcggcaagggagggaaggggctcggcaagggcggcgccaagcgccatcgcaaggtgctgcgggacaacatccagggcatcaccaagccggcaatccgccgcctggctcgccggggcggagtgaagaggatcagcggcctcatctacgaggagacccgaggcgtgctgaagatctttctggagaacgtcatccgcgatgccgtgacctacaccgagcacgcgcggcgcaagacggtgacggcgatggatgttgtgtatgctctcaaacgccagggccgcaccctctatggctntggggggtgatctgtatctggttattcggatctctgtttgtttgctttggtggaaggttgggttgtggaccattgtatttcatgt

SEQ ID NO: 5738 - DNA, 415 bp, Lilium asiatic
  Clone ID: LIB3230-046-P1-K1-H6
gttttctcaatttctcatttaatttttatgaattgaatgtgtcatttgattttctccctgttctttaaatatggatgattatttggagtgaattatctgacttttgttggtgtttctttatgggtatctgatcctcaaaactgttatctgagttgctgtccctctgttttactactaatactttgtactctgggtttttgaaatagggatgatttccgcaaggagttcaaggagaagaacccgaacaacaaatctgtggccactgtaatgctttctattccaatttcagttttatctgtagtgacctatgcttgtttttgtgctgattttgtttgatctgaattcaggtgagcaaagctgggggtgacaagtggaaatcaatgtctgatgctgtgtgtagatcccacataatccg

SEQ ID NO: 5739 - DNA, 412 bp, Lilium asiatic
  Clone ID: LIB3230-046-P1-K1-H8
atgcaggatagtttctttgctagctttgccctcgggtggttgatcactaatggtgcggggcttgcttcctatcccattgacactgttcgcagaaggatgatgatgacctctggtgaggcagtgaagtacaagagctctcttgatgctttccaacagatcctgaagaatgagggtgccaagtcactgttcaagggtgctggtgcgaacatcctccgtgcagtggcgggtgctggtgtgctagctggttatgacaaactgcagctgataatcttcggcaagaagtacgggtctgggtggagcttaagtctgatggcgatgaaaaaagaaactcttttttttttagggtaaaatgaacttcttgtgggatctcagtttgaataatttagtgggagcttctccctcatttttttgc

SEQ ID NO: 5740 - DNA, 407 bp, Lilium asiatic
  Clone ID: LIB3230-046-P1-K1-H9
agcgtcccggcccaaaccctgatctcagccgcatccatggcaccgaagcgaggcgggaaggctgctgcgccggcgaagaagaagccggagaagatcaccaatccgttgttcgagaagcgagcgaagcagttcggcatcggcggggcgctgccgccgaagagggatctacacaggttcgtgaaatggcccaaggtagtgaggatccagcgccagcgcaggatcctgaagcagaggctcaaggttcccccggcgatcaaccagttcaccaggactcttgacaagaatctcgcaacaaacttgttcaagatgcttttgaagtacaggcctgaagacaaggctgccagaagtctgtaagggattcccttggagtcggtgatatacaatttgtgtcatgcagccccacttgt

SEQ ID NO: 5741 - DNA, 406 bp, Lilium asiatic
  unsure (1)..(406): unsure at all n locations
  Clone ID: LIB3230-047-P1-K1-A12
gctgggcggtgtttgataatgagttaaaatggtatcatacagagcctgagcaaggaaaatataattacaaggatgctgacgagatgcttgatttctgtgaaagacatcgcatacaggctagaggccactgcatcttttgggatgtcgcagatgccattcagccgtgggtccagtcgctgaacgaggacgaattgatggccgctgtggagaatcgtctcaagagtctactttgtaggtataaagggaagtttgcacactatgatgtgaacaatgagatgcttcacggctctttctatcaagataggctgggaaacgatatcagagcatacatgtttagagaagctcatcggatcgatccttctccaatcctttntgtgaatgattataacgttgaagatggatgtga

SEQ ID NO: 5742 - DNA, 418 bp, Lilium asiatic
  Clone ID: LIB3230-047-P1-K1-A2
ggcagctaaacccaaggcaaaggcccctgtcaagccgaaggtgaaggccgctgcgaagcctaaggctgttgccaagcccaaggcgaaggccccagctgccaagccgaagcctgcgcccaaggctgcggcgaagccgaagccggctcctcggccggcgccaaaggctcgccctgcaaaggccgccaagacctccgccaaggacgctcccgcaaagaaggctgctgctccggcaaagaaggcaatagtcccaccaccggctaagaaggctgtgcccgcgaagaaggctgctcctgctgccactcctaagaaggccgctcctgcagcgaagaagaaagcggcgactccagcgaaggggaagtccccggcgagaaaggcacctgcaaggaaggcggccaagaagtaggcttttgattcgtga

SEQ ID NO: 5743 - DNA, 412 bp, Lilium asiatic
  Clone ID: LIB3230-047-P1-K1-A3
gtgagtttgttgagagatgctaagaagtccaacacttcgaagggtgttgatgaccgtagtggatcaaatcagccaatccgtagcggtagatagctcaattttgttgacgacaatttcttcagggccatgatgtttcactatttcttcgagttaatgcgagattcacactccaaccacaccaccgcttgatcttttgtagatgtcacatatttcctttttcacccttttagcaaactcatactatcacatcaaatattccatgaaagactccccttaatatttcaaacaccttatagggaggataaacacaccgactgccataagtatgcaacaccacactactacccgacaccgtagttttttcaacaccacaatgtttctttaaaaagctgatttcatcggccgtcctcat

SEQ ID NO: 5744 - DNA, 84 bp, Lilium asiatic
  Clone ID: LIB3230-047-P1-K1-A6
aaaaaaaaaaaacaaaaaaaccccccaacaaaaaaaaaaaagacgaagaacaaaaaaaacaacaaaaaaacaaaaacacaaccg

SEQ ID NO: 5745 - DNA, 258 bp, Lilium asiatic
  Clone ID: LIB3230-047-P1-K1-A7
cgcatctaaacccaaggcgatggcccctgtcaagccggacgtgaaggccgctgtgaagcctaaggctgttgccaagcccaaggcgaaggccccagctgtcaagccgaagcctgcgcccaaggctgcggcgaagccgaagccggctcctcggtcggcgccaaaggctcgtcctgcataggccgccaagaccttcgacaaggacgctcccgcaaagaatgctgctgctccggtaaagaaggcaatagtcccaccaccggc

SEQ ID NO: 5746 - DNA, 405 bp, Lilium asiatic
  Clone ID: LIB3230-047-P1-K1-A8
gctgggcggtgtttgataatgagttaaaatggtatcatacagagcctgagcaaggaaaatataattacaaggatgctgacgagatgcttgatttctgtgaaagacatcgcatacaggctagaggccactgcatcttttgggatgtcgcagatgccattcagccgtgggtccagtcgctgaacgaggacgaattgatggccgctgtggagaatcgtctcaagagtctactttgtaggtataaagggaagtttgcacactatgatgtgaacaatgagatgcttcacggctctttctatcaggataggctgggaaacgatatcagagcatacatgtttagagaagctcatcggatcgatccttctccaatcctttttgtgaatgattataacgttgaagatggatgtg

SEQ ID NO: 5747 - DNA, 379 bp, Lilium asiatic
  Clone ID: LIB3230-047-P1-K1-A9
gcgagtttgttgagagatgctaagaagtccaacacttcgaagggtgctgatgaccgtcgtggatcaaatcagccaatccgtagcggcagatagctcaattttgttgacgacaatttcttcagggccatgatgtttcactatatcttcgagttaatgcgagattcacactccaaccacaccaccgtttgatcttttgtagatgtcacatatttcctttttcaccctttgagcaaactcatactatcacatcaaatattccatgaaagactccccttaatatttcaaacaccctgtagggtggataaacacaccgtctgccactagtatttcaacaccccacttctacccggcaccggttttattccaactccacatttgt

SEQ ID NO: 5748 - DNA, 51 bp, Lilium asiatic
  Clone ID: LIB3230-047-P1-K1-B1
atatatatatagagaaaataataaaaatataatcatataaaatcataacac

SEQ ID NO: 5749 - DNA, 389 bp, Lilium asiatic
  Clone ID: LIB3230-047-P1-K1-B10
cggacgcgtgggttttctttgtgggtataaaggcttttatgaatttgttaaatcaaaaggagtagacattgacatgcctcttggcctggacgtacttgttgatgggattgttcctacagggtctggactgtctagctcagcagcatttgtctgctctgcaacaattgctataatggctgtatttaatgtgaatttccccaagaaagtaatcgctcaactaacatgtgactgtgaacggcatattggcacacaatctggtggcatggaccaggcaatctctattatggccaaatctggttttgcggagctgatagatttcaatcctatccgcgcaaatgatgtgcaactaccttctggcggaagttttgtgatagcccattctttggcgg

SEQ ID NO: 5750 - DNA, 71 bp, Lilium asiatic
  Clone ID: LIB3230-047-P1-K1-B11
cggacgcgtgggttttctttgtgggtataaaggcttatataaatttgtgaaatgaaaaagagaatacattg

SEQ ID NO: 5751 - DNA, 267 bp, Lilium asiatic
  Clone ID: LIB3230-047-P1-K1-B12
cggacgcgtgggggaattctttgtgtttctcttcccccaacctttagaaatctgagctgttttagtctgaaatacatttgatttgtactccttggcatgcattttatagccggaagactgggatgatgaagaagatggtgaatggatagcaccaaccatccctaatgctgactacaagggcccctggacccaaaagaaaattaagaatcccaactccaaggggaaggggaaggcacctatgattgacaacccaaatttcagggatga

SEQ ID NO: 5752 - DNA, 395 bp, Lilium asiatic
  Clone ID: LIB3230-047-P1-K1-B2
gctttctcttctttggtaacgatgtcttcttgctgtggtggaaagtgtggctgcgggtcttcctgcaagtgtggcagtggatgcaatggatgtggtatgtatcctgacttggctgaggggagcactgcctctaccactatgatcatggggtttgctcctgccaagggggagtttgaggggtttgagatgtatgctgagaatggtggctgtggctgcaagtgtggtgataactgcaactgcaacccctgcaagtgtggcaagtgatctctccatggagaagaggatgtagggtttgataccctttgtttacttgtttctgctgtagtgctgaataatggccatgggtttatatgatgcaagtctttttgcaccatgagtggttgttcaccagtggc

SEQ ID NO: 5753 - DNA, 411 bp, Lilium asiatic
  Clone ID: LIB3230-047-P1-K1-B4
cggacgcgtgggggaattctttgtgtttctcttcccccaacctttagaaatctgagctgttttagtctgaaatacatttgatttgtactccttggcatgcattttatagccggaagactgggatgatgaagaagatggtgaatggatagcaccaaccatccctaatgctgactacaagggcccctggacccaaaagaaaattaagaatcccaactacaaggggaagtggaaggcacctatgattgacaacccagatttcaaggatgatccttacatttatgcttttgacaatctgaaatatgttggcattgagctatggcaggtgaaatctggaacactgtttgacaatgttctagttgctgatgacccttgtgttgtggttcgggcaatccgtcgagcacctggcgtgcg

SEQ ID NO: 5754 - DNA, 407 bp, Lilium asiatic
  Clone ID: LIB3230-047-P1-K1-B9
ctaaaattgtactacattgatcttattgaagaggatattacctgccttctagcaaattgtcatactcttgagcaattgatgctagagtcctcgccgcgtttgaggacactgagcattcctcaccctttaagccaattaaataaattggtagtaaaacactgtgcccagctcagagaaataaatatcaatgccataaatctgaggactttattctattggggatatccgacagatctcgtgctttcacaatcttcacatctcgaagatgtatacatccttttcaaaactaaaagtagcgacccaactctggacttttatattactcaactgtttaggaatctgcctcaactccagtcactcgtcttccgcatttccggtgatttgggtgtttcaaagatgctcaaatc

SEQ ID NO: 5755 - DNA, 358 bp, Lilium asiatic
  unsure (1)..(358): unsure at all n locations
  Clone ID: LIB3230-047-P1-K1-C1
ccctctcgtgtgctgtccttatatccccttcctttctataaacatcatccttactgcatttcttgagagagaagcaagagagagagaggatggggaggggaagagtggagccgaagaggaatgagaacaatatcaaccgccacgtgaccttatacaagcgccgcatctgtctgatgaacaaggcctataaactctcgacactttgccatgcggaggctgctataactatgttctccagcacagaggggctttntgagtcacagatcgcagggaccagtaaagacacttgtgcgttacccacgtagttgaaacacttatgacgagactaatgcaaaggctcgcgaaagccagaggtggc

SEQ ID NO: 5756 - DNA, 256 bp, Lilium asiatic
  Clone ID: LIB3230-047-P1-K1-C12
attcccggtcgaccacgcatccctgacgcgtgggcgcaccgttccgagatccgactatgtgtaccttaagctccggggcaagctgtacatgtttgtggtgctgatgactgtgagcaagtttcaatgcggtgatcctgaagcggcttttcatgtgcaaggctaacaagccttctatctctttcaagcgcgtcatcaattttatggttggaaaggttgagaatattgcggtgatagtggggactgtgactgactgact

SEQ ID NO: 5757 - DNA, 331 bp, Lilium asiatic
  Clone ID: LIB3230-047-P1-K1-C3
cggacgcgtgggtttggccctaatatcttctaatcccaaccccatacataagatcggacatggtagctgctggagcaagaatccactgtcacaccggccatcaatggactcaacacattgagcaggccaatcagaacaagaagctcatggtgaaatattccactgaaacatggtgtgcacacttgccgaggatggcccctatctttgatgatctgacttacatgactgtcattgatattgtactcagacacgatgtcgatgaattgaagacctctgacaaagattgcgcgatagaaccaatgccgacctttattctgctgaaggagggaac

SEQ ID NO: 5758 - DNA, 411 bp, Lilium asiatic
  Clone ID: LIB3230-047-P1-K1-C4
cggacgcgtgggcggacgcgtgggcggacgcgtgggcggacgcgtgggttttgtggtggcttttcaattgtgacttttttattttgttgtcactttcgatcacaataccaaaaagtcacaataaccgaaaagcaccacataacttgaatcgaaagtgactttttggttttgttaggattttcggttttgtagtgactttttagttttatcgaaacgttttggttgtatagtaggcaggggtagtttggaggtcatacaaatatttgttcggaaaaaacgtatagggttaaaactcttcccggaaaaactgcaggggtttaaagtcctttcgacatgtatacggctaatttgcacactgctttatctccttgtatgttttgcaatgccgaatctagaatcaataattcagca

SEQ ID NO: 5759 - DNA, 409 bp, Lilium asiatic
  Clone ID: LIB3230-047-P1-K1-C8
ggccgatatgctcagcgtgtcggctctggagctcctgtctaccttgctgccgtccttgagtaccttgctgctgaggttcttgaattggctggtaatgcagctcgggacaacaagaagaaccggattgtacctcggcatgtgtgcctggcggtgagaaatgatgaggagcttggaagactgttgggtggtgttactattgctcacggtggagtcctccccaacatcaaccctgttctgctgccaaagaagaccggcaaggaggggactgagcccaagtccccaaagaaggccactaaatcgcccaaaaaggcttaaatttgttgttgtgacttgtccaatgtatgtatctaattccctaggttttctgtttaatttcggaagaagttaagattatgttgactttgtagtt

SEQ ID NO: 5760 - DNA, 406 bp, Lilium asiatic
  Clone ID: LIB3230-047-P1-K1-C9
tgctgagtcttcaatgaatactgcttatgagaaaaagtggccactatatcttagcaccaaaaatacaattctgaagaagtacgatggaaggttcaaggacatattccaagaggtgtatgaagctgaatggaaatccaagtacgaggcagcaggaatatggtatgaacatcgactcattgatgatatggttgcctatgcgcttaagagtgacggtggttacgtatgggcttgcaagaactatgatggagacgtgcaaagtgatttcttagctcaaggttttggatctcttggattgatgacatcagtactggtttgtccagatgggaaaaccattgaagccgaagctgcacatggcacggtgacacgacattttcgtgttcaccaaaagggtggtgaaaccagtaca

SEQ ID NO: 5761 - DNA, 412 bp, Lilium asiatic
  Clone ID: LIB3230-047-P1-K1-D1
ggcatcctaatgtgtatcctgatgggcgtgtttgcatatctattcttcatccacccggtgaagatccaaatggctatgagcttgctagtgagcgttggacacctgtacattcggtcgagagcatagttctgagtatcatttctatgctttccagccccaacgatgaatcacctgctaatgttgaggctgctaaagaatggagggagagaagggacgacttcaagaagaaagtcagtcgcgttgtcagaagatcccaggaaatgctatgagaggaggaataaatagagcctcactgtgggagggtcttgcttgttgctagtgccagaacaactttcttactatttgaattttaatgttttttcgtcttgtgactatggttgtgcacatcctttttccatactctatttaacat

SEQ ID NO: 5762 - DNA, 405 bp, Lilium asiatic
  Clone ID: LIB3230-047-P1-K1-D10
cgagatcacactataaagaagaatcatggccaagcaccatcccgatctcatcatgtgcaggaagcagccaggaattgccattgggaggttgtgcgagaaatgtgatgggaagtgtgtcatctgtgactcgtacgttcggccatgcactctggttcgagtctgtgatgagtgcaactatgggtcattccaggggcgatgtgtcatatgcgggggtgtcggtatatccgatgcttactactgcaaggagtgcacgcagcaagagaaagatcgagatggctgcccaaagattgtcaatctggggagtgcgaagactgatctgttttacgagcgtaaaaagtatggtttcaagaaaagatgatacgtttccttgcattgcctgggatgggtagacctcacatgctttat

SEQ ID NO: 5763 - DNA, 229 bp, Lilium asiatic
  Clone ID: LIB3230-047-P1-K1-D11
aagcccgggcgacccaccgacgaaagggacacaggcaaagccaaggcgaagagcgaggggggaggaaagaaaaaccaaaaaacaaaacgccacagaagaaagaaacgagagaaaaaaaacgaacgaacgaaaaaaaaaaacccacccgagcagaaaccaagccaaaaggaagaaaagacgaacaaaaaaaaacgcaaaaaacaagggccaagaaaagaccggggagggg

SEQ ID NO: 5764 - DNA, 372 bp, Lilium asiatic
  Clone ID: LIB3230-047-P1-K1-D12
gcattatttggtggtgggcgaggcattgagagggtggacatatctattgatgggggcaagacatggctagaagcttaaaaatatcaaatggacgacaggtcttatttaccggatgatggcgacaagatgggcatgggttttttttaagactgtggtcgacatatccgaaaatgctgaaatcattgctaaagcggccgattccgtagtaaatgtccaaccagagaatgtcgattccatatgtaacttgcggggagtactgaacacatcatggcatcgtgttcgtgtacagaatgccttcctggtaccaaaatccaatctctggaggaaagataagacattatgttcgtcatcatgtcattgaagatgaatctt

SEQ ID NO: 5765 - DNA, 300 bp, Lilium asiatic
  Clone ID: LIB3230-047-P1-K1-D2
ggaagttgcggtgaatgatttcctgcctgccactgatgcttatgaagctgttcaacactctatggatctctatgcttcctacattgtggagaatctgcgaaggtgagcgagctcggatgtcaggactatggaactggggcgagctcggatgtcaggactatggaactgggatgataattttctatttgaagtatgtaatactttccgatatatcaacatatactttaatgttgggtagttcgaatgtcgggactatggaactgggatgttaatcttcttatatgaagactgcttagtagt

SEQ ID NO: 5766 - DNA, 410 bp, Lilium asiatic
  Clone ID: LIB3230-047-P1-K1-D3
ctaaaattgtactacattgatcttattgaagaggatattacctgccttctagcaaattgtcatactcttgagcaattgatgctagagtcctcgccgcgtttgaggacactgagcattcctcaccctttaagccaattaaataaattggtagtaaaacactgtgcccagctcagagaaataaatatcaatgccataaatctgaggactttattctattggggatatccgacagatctcgtgctttcacaatcttcacatctcgaagatgtatacatccttttcaaaactaaaagtagcgacccaactctggacttttatattactcaactgtttaggaatctgcctcaactccagtcactcgtcttccgcatttccggtgatttgggtgtttcaaagatgctcaaatcacc

SEQ ID NO: 5767 - DNA, 411 bp, Lilium asiatic
  Clone ID: LIB3230-047-P1-K1-D4
cggacgcgtgggcgcaccgctccgagatccgacgatgtgtacctcaagctcctcgtcaagctgtacaagtttctggtgcggaggacggggagcaagttcaatgcggtgatcctgaagcggcttttcatgagcaaggcaaacaagccgccgatctctctcaagcgcgtcatcaatttcatgggtggaaaggatgagaagattgcggtgatagtggggactgtgacggacgacaagcgggtgtacgaggttccggcgatgaaggtgacggctcttaggtttactgagacggcgcgggcgaggattgttaaggctggcggcgagtgccttacttttgatcagcttgctcttcgtgcacctctgggacagaacacggttctcctcaggggcccaaagaatgctagggaagctgtg

SEQ ID NO: 5768 - DNA, 414 bp, Lilium asiatic
  Clone ID: LIB3230-047-P1-K1-D5
catatttgagacatttgttcagagcccaatacggaaggagctgtttgagaagattgatgatgaaattatcaggaaggctataaatgcacacattagtattatgaaactagctcaaaaaaaacgtagtcgatacgaatatcagatatatcttacccgctgtgagtttatcaagccaaatagcagctttaaagacgacataaaagcaataggtcaatatgacaagtttccaggtttaagttctgattatatgtataatgaacttgaggaatataaaagctttattatgttctcaccctctgaagaagctgtggcagaatatattgagaacattgagaggaaatttaataggtctttgtatgcctcgaagcaggtaaaagatgtatatgaagcaacagatgtgatttacgatatcgt

SEQ ID NO: 5769 - DNA, 408 bp, Lilium asiatic
  Clone ID: LIB3230-047-P1-K1-E10
cccctttctccggcgattccccgtcgacgatcaccgccggcaggtccagagcgccgcatctcgtcatgaatcctgagtatgattacttgttcaagcttctgctgattggagattcgggtgtcggtaaatcatgtctcctcctgaggtttgcggacgattcatacttggaaagctatatcagcacaattggagttgatttcaaaatccgcacagtcgagcaggacgggaagaccattaagcttcaaatttgggacactgcagggcaagagcgcttcatgacaatcacaagcagttactatcgaggtgcccacgggattatagtggtttatgatgtgacagaccaggagagtttcaacaatgtgaagcaatggctgaatgagatcgaccgatatgcaagtgagaacgtca

SEQ ID NO: 5770 - DNA, 386 bp, Lilium asiatic
  Clone ID: LIB3230-047-P1-K1-E11
cgcaggatcggcccgtccgcgtctatgcagacgggatctacgatctcttccattttggccatgcgcgggccctcgagcaggccaagaagctgttcccaaacacatatttacttgttggatgctgcaatgatgaaattactaatagatacaaggggaagactgtcatgactgaatctgagcgctatgagtcactacgtcactgcaagtgggttgacgaggttatccctgatgcaccatgggtcatcacacccgagttcattgacaaacacaagatcgactttgtggctcacgatgcactaccttatgcggatgcaagtggggcaggaaacgacgtttatgagtttgttaaagccattggaaaattcaaggaaacaacgcgcacaaat

SEQ ID NO: 5771 - DNA, 415 bp, Lilium asiatic
  Clone ID: LIB3230-047-P1-K1-E3
ggacatccccgatcagaggagcccagggtgcggggtgagcgccatgttgaccgtgacagggagaagtctcgagaaagaagggacagggatcgtgatcgggagaagtcccgcgagcgatctcgtgacagaatacgagaaagagatacaagagagggttaccatcacagagaccgtgacagggctagagacagagacagggacagtgaaagagatcgtgtccgtgaccatgatcggggtcgtgatagagggagggatcgagaccttggccgtgattatgatcgtgcaagggacagggacagggaccgtgagcatccccgagagagggtgcgtgatagagattattatgaccgcgctagtcgagaaagagatcgtgctcgtactcaggaaagggatgttgactatgagtacattgaaa

SEQ ID NO: 5772 - DNA, 414 bp, Lilium asiatic
  Clone ID: LIB3230-047-P1-K1-E4
gcagtatctggtggtgggcgtggcattgagagggtggacatatctgttgatgggggcaagacatggctagaagctcaaaaatatcaaatggacgacaggtcttatgtaccggatgatggcgacaagtgggcatgggttctctttaagactgtggtcgacatatccgaaaatgctgaaatcattgctaaagcggttgattccgcagcaaatgtccaaccagagaatgtcgattccatatggaacttgcggggagtactgaacacatcatggcatcgcgtccgtgtacagaatgcctcccgggtaccaaaatccaatctctgaaggaaagataagacatcatgttcgtcatcatgtcattgaagttgaatcttgtcatgtaagaccttacagcttccttgttaagcttctattata

SEQ ID NO: 5773 - DNA, 407 bp, Lilium asiatic
  Clone ID: LIB3230-047-P1-K1-E5
gaaagtttcgtattcagagaaaatctcgaacatattttcttcgttgggttacaagaggcctgcagtaatgcagtctatgtatatatttaagcaaccaggaattggtggagaagtcgtaccacaccaagataattcatttctctacacagaacctccgtcatgcacagggttgtggctagcactagaagatgcaaccataactaatggttgcctttgggccatccctggttcccacaagaatggccttgtcaggaggtttattagagacgaagatggtgtccactttgatcgcccatcaccatcttatgatcaaaatgagtttgttccgctggaaatgaaagcaggctctttggtggttatacatggcgaccttatacatcaaagccttgaaaaccagtctcccaatt

SEQ ID NO: 5774 - DNA, 385 bp, Lilium asiatic
  Clone ID: LIB3230-047-P1-K1-E7
ggcttttcatacccgttttgagcctctctgtcggtaccaatcagattgttttgagggtttctgggtgatttggcgacgacccagatcgggttttgaggcgaattgcggaggacccagatcgagatcttggtggtttcagttgaggggagttgttgaattaggccgggcagtgatgtctggagtggaggagcagctggagatcaagttccgattgcacgatgggtcggatatcgggcccaggaagtatactgatgccaccagtgttgcgactatgaaggagagcattctcgcgcaatggcctaaagatcaggggaatggacctaagacagtgaatgacatatagctgatcaatgccggaaagatattggaggacaacaagacatta

SEQ ID NO: 5775 - DNA, 298 bp, Lilium asiatic
  Clone ID: LIB3230-047-P1-K1-E8
ggacatccccgatcagaggagcccagtgtgctgtgtgagcgccatgttgaccggggcagggagaagacttgagaaagaaaggacagggatcgtgatcgggagaagtccttcgagcgatctcgtgacagaatactagaaagagatacatgagagggttaccatcacagataccgtgacagggctagagacagagacagggacagtgaaagagatcgtggtcgtgaccatgaacggggtagtgattgagggagggatcgagaccttggccgtgaaaatgatcgttgcaagggacaggggc

SEQ ID NO: 5776 - DNA, 374 bp, Lilium asiatic
  Clone ID: LIB3230-047-P1-K1-E9
cttgattaccctgcaaggttggagacggctgtggagacatcctcagatgctactattgatgataaatctgatattttcaaaacctggtatccaccgttggagagaacagtttcatgcctatcgaagctataccattgcttagaacccgcagtttttactggcttagctcaggaagctgtggaattttgttcgatatccatacagaatgcaggcaaatctgttgcaaaacgatcatctcaaatggatggacaactgttccttgttaagcatcttcttattttaagggaacagattgctccttttgacattgaattgtctgttacccacaaggaactggatttttctcatttgctggagcatctaagaaggatcct

SEQ ID NO: 5777 - DNA, 405 bp, Lilium asiatic
  Clone ID: LIB3230-047-P1-K1-F1
ggaagatgggacacattgggataagatctcacaaggagggctgcaacgaatctacgagaagtacacttggaagctctattctgagaggttgatgactctggctggtgtctatggtttctggaaatatgtctctaatctagataggcttgagacaaagcgctaccttgagatgttctatgccctcaagtatcgcaaattggcgcaatcggtacccttggctgttgacggagagttcgctgtcaatggatcggcaaccttagctgttgacggagagactgttgtcaacggaactaaggtacccttagctgttgacggagagactgttgtcaacggaaataagtagttttcgcaactgattgaaagttgagttttatgtttcaaataagggtctcagatggtagtgtc

SEQ ID NO: 5778 - DNA, 405 bp, Lilium asiatic
  Clone ID: LIB3230-047-P1-K1-F10
ggagcgagcaaccttcatttcccatggaaacactgccaggctcgccaaggagcttggggacctgaaactagctcagatatgtggaataatcgcctctgacgagaagcgccacgagaccgcttacaccaagatcgtggagaagctttttgagatcgaccctgatggcacagtgctcgcctttgcggatatgatgaagaagaaaatatcaatgcctgcacacctgatgtatgatgggagcgacaacaacctgttcgagcacttctcagcagtagcacagcggttgggtgtgtacacagcgaaagactatgctgatatactggaatttctggtgcataggtggaaggtgggagagctgacgggtctttcgggtgaggggaaaaaggcccaggacttcgtatgcactct

SEQ ID NO: 5779 - DNA, 251 bp, Lilium asiatic
  Clone ID: LIB3230-047-P1-K1-F12
aagaaaaaaccaaaaagaaaaaaaaaaaaaaaaaacaaaaaaaaaaaaagaaaaaaaaggaaacaaaaaaaaaaaaaaaaaaaaaaaaaaaaaaaaaaaaaaaaaaaaaaaaaaacaaaaaaaaaaaaaaaaaaaaaaaaaaaaaaaaaaaaaaaaaaaaaaaaacaaaaaaaaaaaaaaaaaaaaaaaaaaaaaaaaaaaaaaaaaaaaaaaacaagacaaaacaaaagaaaaaaaagaaaacaaccgac

SEQ ID NO: 5780 - DNA, 402 bp, Lilium asiatic
  Clone ID: LIB3230-047-P1-K1-F3
cggacgcgtgggctcacagatggatcattccagtggaaatggccagtgggaaacactggagctttatcttgaaaaatataaagggttgcacccaagattgcctgccacggttgctgaaacacttctacacactgatcctcagattgagctacctctttggcttgttcatatgttcaagtatggacggaaagcagcatcgtggggaatgactggacaggaatctgatcctgcaaccttatttcggctgtacgtagactatggtcgacatgctgaggctactaatctgttgctcgagtacctagaatcgtttgcatctctgagaccatccgacgtaattaatcgtaaaaagatgtctgcaatttgtttcccatacacggctattgaacgactgtggtgtcaact

SEQ ID NO: 5781 - DNA, 409 bp, Lilium asiatic
  Clone ID: LIB3230-047-P1-K1-F5
ctcacttcctctcgcccaaagcaaggtcgattccttggctccgcaatgccgacagtgagtgtcaagtggcaaaaggagctatttccagctgtagagattgacactagtcaacctcctcttgtattcaagtgccagttgtttgatctgactggtgtgcctcctgaaaggcaaaaaattatggttaaaggcggtctgctgaacgatgatgcacattggtcggccttgggtgttaaaaatggtcaaaagctaatgatgatgggcactgctgatgaagccgagaaagctccagagaaaggtcctgtgtttatggaagaccttcctgaagaagaacaagtcgtcgctgtgggtcacagtgctggtctttttaacctgcgaaacacttgctacatgaacttcacattacaatgtc

SEQ ID NO: 5782 - DNA, 270 bp, Lilium asiatic
  Clone ID: LIB3230-047-P1-K1-F7
gctcgagggacagatatgaggcatggctgtgcgagtgctcacttgctctattcaaaacaactgtagctggtagaatctccggtatatatgtctcgagtaatttgattatgatggcgtatgtgtatatatgtagatcgtggtgtattatctgttttcggatactcatactttattgtgttaaatcagtattttggtctcattttcagccattttagcaggattgtatctcagtaattgactcatgtatcagagtaatgaatagtcgtcttg

SEQ ID NO: 5783 - DNA, 357 bp, Lilium asiatic
  Clone ID: LIB3230-047-P1-K1-F8
cggacgcgtgggctcacagatggatcattccagtggaaatggccagtgggaaacgctggagctttatcttgaaaaatataaagggttgcacccaagattgcctgccacggttgctgaaacacttctacacactgatccttagattgagctacctctttggcttgttcatatgttcaagtatggacggaaagcagcatcgtggggaatgactggacaggaatctgatcctgcaaccttatttcggctgtacgtagactatggtcgacatgctgaggctactaatttgttgctcgagtacctagaatcgtttgcattctcttagaccattcgacgtaatttaatcgtaaaagatgtttg

SEQ ID NO: 5784 - DNA, 405 bp, Lilium asiatic
  Clone ID: LIB3230-047-P1-K1-F9
ggcctttcgcaacattcccggtgttgatgttgcgaatgttgagcgtctcaacttgctcaaactggccccggggggtcaccttgggcggttcatcgtctggacgaagtcggcatttgagaagctcgactcggtttttgggacttttgagaaggcttctgatcagaagaagggttacgtgctgccgaggtccaagatgtcgaatccagatctatcgaggatcatcaactctgacgaggtgcagtcggttgtcaggccgatcaataaggatgtcaagcgccggacgttgaagaagaacccgcttaagaacctcaacactctgctgaggctgaatccctatgcaaagactgcgaggaggatggcgttgcttgctgaggcgcaacgtgtgaggtcaaaaagaaaagctgg

SEQ ID NO: 5785 - DNA, 401 bp, Lilium asiatic
  Clone ID: LIB3230-047-P1-K1-G12
ggagaactttcgggcgctctgtacaggagagaaagggattggatccacaactggaaggctgttgcattataaaggattaatgttccatcgtattattaaagggctaatggcacagggtggtggcttttcaagacgaaatggaaaaggcggggaaagcatatatggtggaaacttcgaagatgaaaatttcttaatacaccatgatggtcctggtattctatcaatgggtaatactggttctgactccaatggttctcaatttttcattactttcaaggccgctcctcaccttgatgggaagcatgttgcttttggaaagctcatttcagggcatgaaactttgaagaagatagagcgtgttgaagttgataatgaaaagcctatttttcctgtgaaaatag

SEQ ID NO: 5786 - DNA, 340 bp, Lilium asiatic
  Clone ID: LIB3230-047-P1-K1-G3
aaaaaaaaaacacaaaaaaaaaaaaaaaaaaaaaaaaacagaaaaaaaagggcgagaaaaaaaaaaacagaaaaaaaaagaaaaaccaaaaacaaaaacaaaaagaaaaaaaaaaccacacaaaaaaaacaaaaaaacaaaaaagaaaaaaacaaaaaaaaaaaaaaaaaaaaaaaaaagcaaaaaaagaaaaaaaaaaaaaaaaaaaaaaaaaaaaaaggacaaaaaacaaaaaaaaggaaaaaaaaaaaaaaaaaaaagacaaaaagaacaaaacaaaaaaaaaacaaaaaaaaaaaaaaaaaaaaaaaaaaaacaacaaacaaaaaagaaaaaaaaa

SEQ ID NO: 5787 - DNA, 414 bp, Lilium asiatic
  Clone ID: LIB3230-047-P1-K1-G4
cggacgcgtccgcccacgcgtccgcggacgcgtgggctcgctagactacctcaacctgtccttcaacaagttttccggctccatccctgccttcctcgccaatctccccctcggtttcacccgcctcgaccgcaaccgcctcaccggtcccataccagaatcacttgctaggactacttccacctacctctacctttcccacaacaacctaaccgggccgctaccaccttcctttgcttccacatctgtccaggtcattgatttctcccgcaaccgccttgccggagatgcctcgcttctgttaggcgccaagaagccactacagaatcttgatttgtcaaggaatttgttcgagttcgacctgactaaggtggtgtttccggagaatctgacgactctagatataaaccacaa

SEQ ID NO: 5788 - DNA, 116 bp, Lilium asiatic
  Clone ID: LIB3230-047-P1-K1-G5
cggactcgttcgcccacgcgtacgcgtacgcgtgggctcgctagactaacctcagcctgtggttcaacaagatattcctgccttcattccttgcgcttcctctcccaatttttccc

SEQ ID NO: 5789 - DNA, 406 bp, Lilium asiatic
  Clone ID: LIB3230-047-P1-K1-G7
ggtcaaaataggccataaaaccataaagtgtggttgtttagcaaatgttgcagttttaaaacctaaaagggtcaaaataggccataaaaccatagactgtgtcttcgttgggtattaacttcgaattatatcctcaataaagtctctcataaaaagacacataaaatacctcatgaacaatggtagagtaggaaacctaccttgaaattcttgaaagtgtgggtgtttagcaaatgttgcggttccaaaacctaaaagggtcaaaataggccataaaaccatagactgtcttcattgggtatgtacctaacagtgtatatcagtttctagtacataaattagatattctaggtgtgcacgttaatacgataattgattcaatgaatgcttctttctttgaacacat

SEQ ID NO: 5790 - DNA, 369 bp, Lilium asiatic
  Clone ID: LIB3230-047-P1-K1-H1
caagggttgtgtatatgtgttggattccttcaaagttggcatcggtggtggtggaaaagtgatcatgacgttggtcgaagctgttgatatctatcttataggcacggttatgctcgtcttcgggatgggtctctacgaactcttcatcagcaatctcgactttgcaaagacatctacagatggatcaaacatgctcggcttgtttaaactcatggaacgaccacagtggctcgagatcaagtcactcaacgagttagagaccaagttcgggaatgtcatagtgacagtccttctggtcgggttgctcgagaagtgcaagaaggtgagtatcatttcagctactgatctgctctgcttcgcaacttctgt

SEQ ID NO: 5791 - DNA, 399 bp, Lilium asiatic
  Clone ID: LIB3230-047-P1-K1-H12
cgggatcgcacaggatctccgatcagatggccgcctaaggaggcaatttcgaccaatatctgttgaaacgggagtaattcctcaggcaaatggctcggctcgggttagattgggtgccacagaagttattgctagtgtcaaggccgaactggggaaacccagccctcttcaacctgacaaagggaagatttctatatttgtcgactgtagtccaacggcagccccaatgtttgagggcaggggtggtgaacaattgtcgacggagctctcagtttctctgcaaagatgcttattgggtggtagaagtggggcaggtgctggaattgatctctcacctctgataatttctgagggtaagatctgctgggatctgtatattgatgggcttgtcgttagtgc

SEQ ID NO: 5792 - DNA, 300 bp, Lilium asiatic; identical to SEQ ID NO: 5765
  Clone ID: LIB3230-047-P1-K1-H2

SEQ ID NO: 5793 - DNA, 400 bp, Lilium asiatic
  Clone ID: LIB3230-047-P1-K1-H4
agtcctcaattctctcagatctctcactaatggcgcccaaggccgagaagaagcccgcggcggagaagaagccggccgtcgaggaggagaagaaggcggttccggcggagaagaagcctgctgagaagaagcccaagggcggaaagaaggtcccggcctctaaggagggggcctctgacaagaagaagaagaggtcgaagaagtcggtggagacctacaagatctacatcttcaaggtgttgaagcaggtccaccctgacatcgggatctccagcaaggcaatggggatcatgaacagcttcatcaacgatctctttgagaagatggctcatgagtccgcccgccttgctcgctacaacaagaagaacaccatcacctcttgggagattcagactttcgt

SEQ ID NO: 5794 - DNA, 407 bp, Lilium asiatic
  Clone ID: LIB3230-047-P1-K1-H6
ctggttttgaggagggcgatatggagggggacgttgttgtggaggagtttgatttactggcaccataagagttggacaatttgatttgtaatgcccaggttgtctacatgcatagtagacctttcctagagggagaggatttgggcgttgagactcatcattagattgttgatgatgaggttcttcccttacataaggatggttgcgtcctccattttgctttgatctttttgccaaaatttgagcctctctttgttttctctttttcacattcagagctcgagtgacaacctctctataatctttaattaagtgtgaagatagttgttttgcaatagatagttttagtccttgttcaaacctttttgcctttcgaacatttgtatccacttggtgtggggcatagc

SEQ ID NO: 5795 - DNA, 410 bp, Lilium asiatic
  Clone ID: LIB3230-047-P1-K1-H7
ccaccctccactacaccgtcgatgtatacgtctacgcctctacctccacaactacgtccacgacgacgtcttcaagtgatggcgacatccacttcctacctccaccgacggctgtgatcaatatccagtgcatacaagctccctaagccgtccactgtagaggaagaatccagagagcaagcaagactgtccgatgaagaagacctttagattccagatccagatcgagccagttccccccaaaattgccaatagaggtaaagtttcaaatattttgatactgatgtgagtctctttttgtaggaatagtttgtgtgatttcaagcgtgcgagatccaagttcatgctataaaaagacctcaggggatgaagaagaaataggactgaaggctcggaagggttctacgggt

SEQ ID NO: 5796 - DNA, 437 bp, Lilium asiatic
  Clone ID: LIB3230-047-P1-K1-H8
aaaaacaaaaaaaaaaaaaaaacaaaaaaaaaaacaaaaaaaaacaaaaaaaaaaaaaccaaaaaaaaacaaaaaaaaaaaaaaaaaaaaaaaaaaaaaacaaaacaaaaaaaaaaaaaaaaaaaaaaaaaaaaaaaaaaaaaaaaaaaaaaaaaaaaaaaaaaaaaaaaaaaaacaaaaaaaaaaaaaaaaacaaaacaaaaaaaaaaaaaaaaaaaaaaaaaaaacaaaaaaaaaaaaaaaaaaaaaaaaagaaaaaacaaaaaaaaaaaaaaaaaaaaaaaaaaacaaaaaaaaacaaaaaaaaaaaaaaaaaaaaaaaaaaaaaaaaaaaaaaaaaacaaaaaaaaaaaaaaaaaaaaaaaaaaaaaaaaaaaaaaaaaaaaaaaaaaaaacaaacaaaaaaaaaaaaaaaaaaaaaaaaaacacaaaaaaaa

SEQ ID NO: 5797 - DNA, 329 bp, Lilium asiatic
  Clone ID: LIB3230-047-P1-K1-H9
gtgagttagttgagagatgctaagaagtccaacacttagaagggtgttgatgaccgtattggatcaaatcagccaatccgtagcggttgatagcttaattttgttgactacaatttcttcagggtcattatgttatactatttcttcgagttaatgcgagattcacacttaaaccacaccaccgtttgatcttttgagaaattacatatttcctattttacttttttatgatatttatactttcatattaaatatttcatgaaagactgctctttatattattaaacactttatagggtgtataatcttaccgtcttgttataaggatt

SEQ ID NO: 5798 - DNA, 402 bp, Lilium asiatic
  Clone ID: LIB3230-048-P1-K1-A10
ggtttggatttgggtctggacttgatggagaccaatcttcacagaaaaagactagcgattttgtccatatcttgttgaaatcgaggaagaagacctttgtgaccgtgacagatgctaaggggaacaagaaaaccggggcctccgcaggttctttggaggggggaagaaaagggcggtctcgtccttctcgttatgctgctgaagcaactgcggaacatgttggtcgatctgcccgaaagatggggttgaagtcggttgtagtgaaagttaaaggatattcttttttcaggaaaaagaagaaagtgatcatgagttggagagagggttttctaggtgaaggagtaggcgatcaatctccaatcatgcacatccatgatgtgactcaacttccacataatggat

SEQ ID NO: 5799 - DNA, 390 bp, Lilium asiatic
  Clone ID: LIB3230-048-P1-K1-A11
ggttttgccgccgtcgccgttgctgccaccggagctcgttgcagcctaaggacgaattggagctaattgacacttgagaaaatggcccctcccgcgaaagttgccaagaagcctgatggtaaagcacaagcattgaaagttgccaaggctgtgaaatctggtgctttaaccctgcaaaagaaggccaagaagatccgcacatcggtgacctttcatcgtcccaagaccctgaagaaggatagaaaccccaagtaccccagaatcagtgcccctccaaggaacaagctagatcactaccaaatccttaagtattcactgaccactgagtctgtcatgaaaaaagatgaagacaacatcactcttgttttaattggtgacattcgagctgac

SEQ ID NO: 5800 - DNA, 408 bp, Lilium asiatic
  Clone ID: LIB3230-048-P1-K1-A4
cgggcgatggatagcaacctagcgttggtgtgggagatcgccggccccggcatcgccggcgccatcttcggcgccggctggtggttctgggtcgacgccgtcgtctgcagcgccgtcaagatctcgttcctccactatctccccgggatattcgcatcgctggcggcgctgatgttcaattgcgtcgggaaggatgatattggatatgattactcgccctatggggagtccgagtggagagtgaagctgtggcttttcgttgcgtatgttgtatcgttcgtttcgttggcagctgcgacaggcttattggtacaagatgcactcacagataagggcccctcgtcgtggacaggtgttgctggcgtacttcagtgtgtgtttgtgctgataagtgggctggcgtactgg

SEQ ID NO: 5801 - DNA, 407 bp, Lilium asiatic
  Clone ID: LIB3230-048-P1-K1-A6
gatctataaaaccaaccaaacggatcaaccccctttccatcccatccaagacttccaaaatctctgcaaatttgtgataatgggggaaagtctcatgcagatgtttcatggggcctcatcggctcaagctgtagaggatgagatgtttgattctgattctctctccagtgattctgaaaattccatcttttcatcttcttcatccgatctcgcagaggatgcttcttcctcatctccggatggaccactctatgatttatcatccatcatggaggatcttcctatcaaaagagggctctccaaatactatcaagggaagtcacagtcctttgcatgcctctccgaagtgtcatgcttggaagatcttgccaagaaaggctctcctctaagaagaagctgaagtcgag

SEQ ID NO: 5802 - DNA, 335 bp, Lilium asiatic
  Clone ID: LIB3230-048-P1-K1-A7
attcactttctcaaagtccctttccactctgtagtcccccaccatcatcttacccttcaaaacctatggcaatggatgcctcacctctctgagtgagagagatgaagagcaagagctgcatctatactctataaataacacctcttcaaaccctaagatctccaacacttgaagggagaagcaaaggacagctcctacctccttcctcaaacattccccttcccggctgatccgcaagactggagccagacaagggaaagatgggtaggggtaagatagagatcaagaggttcgagaacaccaccaacaggcaggtcaccttctgcaagcgccgc

SEQ ID NO: 5803 - DNA, 313 bp, Lilium asiatic
  Clone ID: LIB3230-048-P1-K1-A9
gcgtgagggaaaccaagaccgaccaggaatactatggaaaaactggagaagggcaaggggacgggcgcgctggtaggcaacgattacaatcgcacctcatgcggaagctgcaaggacaccgagcaggggatctcgaaacagagccgaggcgccggcaaagaaaaagcccccggcatggaccgcaagcacaacgctaaagaagaaaatgaagagcaaaccgagggtgcagacccgacaaggattaaggcagagccaataaatcacaactataaaaaaggacagctgcaggaagcattaccaaccagagacaaag

SEQ ID NO: 5804 - DNA, 408 bp, Lilium asiatic
  Clone ID: LIB3230-048-P1-K1-B1
gcgtgagggaattcaagaccgacgaggaattctatggaattttggagaagggcaaggagacgggcgcgctggttgtcatcgatttctttcgcacctcatgcggtagctgcaagtacatcgagcaggggttctcgaagctgtgccgaggcgccggcaaggaagatgctcccgtcatgttcttcaagcacaatgttattgatgaatatgatgagcagtccgaggttgcagaccgactaaggattaaggcagtgccattatttcacttctataaagatggagtgctgttggaagcatttccaaccagagacaaggagagaattatcgctgccatcaacaaacatacttcgccagcttaactcgttgcggtccagataattttttactgaaatttgttgtttcagagatggc

SEQ ID NO: 5805 - DNA, 405 bp, Lilium asiatic
  Clone ID: LIB3230-048-P1-K1-B10
ggagagcatagattgggcccgaatttccaacctgatcgccggcgctgcgcttggaatttctccccaatccgcaacatggattggagtggaattccgcgttgatcagataaaaattcccctagatcggagcaaaattctcagttggatggtctaaatcatggcagcgcgagtcagtaactctccatccctgtggtcatcttgaattttcactaaagactgcacctttgcaaaggggcagttcggagaaaaactcttggagggctgatgttgattggataaccataattcaacagtgagcaaattaccctctttcaccctctgttacccaagtttcttcctagacatgatttaatagtgtgattttcatcagtaattttgaagtaatggggactgttattctatgtg

SEQ ID NO: 5806 - DNA, 382 bp, Lilium asiatic
  Clone ID: LIB3230-048-P1-K1-B12
cggacgcgtgggcggacgcgtgggtgggcgcacaggtcattggcttaatcacagtaaggaacattgccttgttgggataaagggaaatccagaagtgaaccgcaacatcgatacagatgttattgttgctgaggttcgtgaaacaagtcggaaacctgatgagatgtaccctttactggagaggattagcccaaggacaaggaagctggagctgtttgcccgcatgcacaatacacaggctgggtggatgtcgttgggtaatcaactacaaggcgcaaggttagtagatgatcggctgagagcaaggttcaaggctgcataccctgacgtggaagtacagccagctttacctcctaggatatcatctttcatggacgtggat

SEQ ID NO: 5807 - DNA, 400 bp, Lilium asiatic
  Clone ID: LIB3230-048-P1-K1-B2
gttattccaaaaaataaaacaagggggacatgtattaactgcagtgagaaatttgagagtgaactaaagtcagaaacagagccatctcaagatgttccatgtcaggacctcgaaactgtcgttcatgccacttccgataccaatttaattactgatcaatcaccaggtatggcaacagaagttggtgtaaaatcatactctgaagatgttggctcgaaagatacagatacagtggaagctgaagcatgtgataacgggaaaatagttaaaatggcaacaaaaggggtaaaggagaagttacactctgtcagcaagtggagaggcgttgatcctgttgtgttttttacagatgtatcaactatcgatagcataaaattcttttatggtatcagcgaattat

SEQ ID NO: 5808 - DNA, 409 bp, Lilium asiatic
  Clone ID: LIB3230-048-P1-K1-B6
agaagctgctggtttttcagaggggcttgcaggctttcagaaaaaggtatttgatgtcctttataaagtagctgacattccctttttggcgccatacaagagtaagatcatggaagtgattgagaagggcgagacccaacctaatttgaccattggaatcctggtgtctattgtggtggttcttttgacagtagttttcaagatcctctttggtggaaaaaagaaacccgtggctgctgctaaaccagttgttgaaactaaggctgcagaggtctctgaaactgagaaggtaggaagcagcactgaagatgagaaggagaaggaagatggtactggcccacgtcctaggcggtccaggcgtgagacttagggttggtatggaggctggaattttgaattttcgatctta

SEQ ID NO: 5809 - DNA, 389 bp, Lilium asiatic
  Clone ID: LIB3230-048-P1-K1-B7
caacagttgtatcgaattagcactatgtattgggatgacaaatatgggacacatactgtatcgtcagatgttatttcaagtatgagagttatgatgaccgaggactccaacaatgcagtcagttcttcgttcttgttggatgatgattccagcataccatttacggtggatgacatttccaagtcaatgacaccgatagagatatcagatgttgatccaccaccgctgatccgtgagaactcggggtttcagttcttgccacagagggagtagaagtcccatcagccctttcagtctatagcaatctgtgaatatatttcattcaaggccatcgtgtgattatttcattgtttgcctgcgagactatgcaggacggtgttgatcccgtt

SEQ ID NO: 5810 - DNA, 168 bp, Lilium asiatic
  Clone ID: LIB3230-048-P1-K1-B9
gcgagcatgaaaatcttcagatagaacctgaatatagtgggatccaaagcgaggctgaagttcaagatattagccctgttgaagatgtaggtgatggttcctatgaaatagaagaagaaaatttcttgtagtaaaatctggttgcttgaaaagcatgggaatttcggt

SEQ ID NO: 5811 - DNA, 391 bp, Lilium asiatic
  Clone ID: LIB3230-048-P1-K1-C1
gcgtgagggaattcaagaccgacgaggaattctatggaattttggagaagggcaaggagacgggcgcgctggttgtcatcgatttctttcgcacctcatgcggtagctgcaagtacatcgagcaggggttctcgaagctgtgccgaggcgccggcaaggaagatgctcccgtcatgttcttcaagcacaatgttattgatgaatatgatgagcagtccgaggttgcagaccgactaaggattaaggcagtgccattatttcacttctataaagatggagtgctgttggaagcatttccaaccagagacaaggagagaattatcgctgccatcaacaaacatacttcgccagcttaactcgttgcggtccagataattttttactgaaattg

SEQ ID NO: 5812 - DNA, 402 bp, Lilium asiatic
  Clone ID: LIB3230-048-P1-K1-C10
gcttaacgtcgcccagactagcagtgacctcgacgtcggtgtacccgtcatcttcactccggcgaacactgacgacaatgttgtccagtacttgaatgatgtaagcattaagttccatgcccccaccatctgtactctatcgacagtctggcggctggccaaggccgacgacaatactgggaagcgctttgtgaccatcgggggagttcccggcaaagagaacacttggttcaagatccagaaaacaggcaagtatgcatacaagctggtgtactgcccaagtgacgagaatgcctgcagcgatttaggcatttactacgacaaggaggccgggaagaggtggcttgctttgagcgactcgccattggaggttatgttcgtcaaacactgatcgtcactact

SEQ ID NO: 5813 - DNA, 357 bp, Lilium asiatic
  Clone ID: LIB3230-048-P1-K1-C11
cggacgcgtggggcaatctcgaagtttgttgaagacaagcacaaggatcacctcccggcaaatttcaagaagctcatcctcgtacagcttcggaagctcactgctgctggcaaactcaccaaggtcaagaactcctacaagatccctgccaagcctgttgtcggtgggaagaagacagctgtctctgccaagctgaagccgaagtctgctgttgtgaagccaaagaaggcggctgtgaagccgaagccaaagccaaaagcatctgccgctaaacccaaacccaaggcaaaagcatctgctgctaagcctaaaatcaagtctgctgctgtaaagccaagggcagcagtgaagccgaag

SEQ ID NO: 5814 - DNA, 298 bp, Lilium asiatic
  unsure (1)..(298): unsure at all n locations; Clone ID: LIB3230-048-P1-K1-C5
caaatacactaaacctcctgagctctgcaatagggagaagcggatttgcgagttctgttactaactcaaggagcggtatcatcatccagtcaatagtagatactggtgtctctagcttagccacataattctagtgatgtcggtaagatttactttcgtgaagtagtactccgttatgtcaggattcagtagaacatacaatagtagaatagattgcttgtaatttctttgtgggatagtttgttctgatatctatgtgaactatttcttataaaacananaanaaaaaaaaaataat

SEQ ID NO: 5815 - DNA, 408 bp, Lilium asiatic
  Clone ID: LIB3230-048-P1-K1-C9
gagaagacgaagatccgtctgcactcgcacgatgtcgcgtacggatccggtagcgggcagcagtccgtcaccggattccccggtgttgacgattcgaatagctactggatagtgaagcctatacctgattcaactgacaaacaaggtgatgccataccaagtggtactattgttaagcttcaacacatgagaacacggagatggttacacagccacctacacgcttccccactatccggtaaccttgaggtcagctgctatggaggggacgataagacagacaccggagatttctggcggcttgagattgaaggggggagtggaaaaacatggaagcaagaccagaaagtaaggctacagcatgttgacaccggtggttacctccatagccacaacaagaaattcacc

SEQ ID NO: 5816 - DNA, 359 bp, Lilium asiatic
  Clone ID: LIB3230-048-P1-K1-D11
caaactgctcgcaagtccactggagggaaggcaccaaggaagcagcttgccaccaaggctgctcgtaagtctgcccctacaaccgggggagtgaagaaacctcaccgctaccgtcctggaactgttgcccttcgtgaaatcaggaagtaccagaagagcacagagcttctcataaggaagctgccatttcagaggcttgtcagggaaattgctcaggatttcaagacagatctgcgattccagagccatgcagtccttgcacttcaggaggcagcagaagcttaccttgtgggtctgtttgaagacacaaacttgtgtgccatccatgctaagcgtgtgaccattatgcctaaagacat

SEQ ID NO: 5817 - DNA, 400 bp, Lilium asiatic
  Clone ID: LIB3230-048-P1-K1-D2
atcccctctccgtctgagattccccggttgagagagatggggctcactttcaccaagctgttcagccggttgttcgcgaagaaggagatgcggattctgatggtcggtctcgatgcggctggtaagacgacgatcctgtataagctgaagctgggcgagatcgtcaccacgatccctaccatcggattcaatgtggagactgtcgagtacaagaacattagctttactgtttgggatgttgggggtcaggataagatcagacctctgtggaggcactacttccagaacacacagggactgatattcgtcgttgatagcaatgacagagatcgtgtggtagaggcaagagatgagcttcacaggatgctaaatgaggatgaactgcgggatgctgtgttac

SEQ ID NO: 5818 - DNA, 269 bp, Lilium asiatic
  Clone ID: LIB3230-048-P1-K1-D3
gggcgggccacgcgtccgatcccctctccgtctgaaattccccggttgagagagatggggctcactttcaccgggggtgcagcctttttttttcgaaaaacgagatgcagattcttatggatcttctcgatgcggctggtaagaccactatcccgcattatccggatcttagctatatccttatcacgacccctaccatatttatatttgtggagacggttgagttcaagaacataacctgcattgtttgaccatgttggtggttatct

SEQ ID NO: 5819 - DNA, 407 bp, Lilium asiatic
  Clone ID: LIB3230-048-P1-K1-D5
gcgacatgccggtactggcaccgatcgctcaacccgaagaagctgattgatgttgggttctcccggcttggagcgaggatgacaatgagccgcactatccgtctctacaagcttccggagacgacggtgaccccggggttccgaaagatggagctgcgtgatgtcccggcagtcactcggttgttgaggggatacttgaatgagtttgttgtggcgccggactttgatgaggcggatgtggagcattggcttcttccaaaggaggatgtggtggatagctacttggttgagagccctgagactcatgagatcactgacttttgcagcttctacaccctgccgtcgtcgattctaaataatcagaactattcagtgttgaaggcagcatattcgtactataatgtgtc

SEQ ID NO: 5820 - DNA, 152 bp, Lilium asiatic
  Clone ID: LIB3230-048-P1-K1-D6
ggacgggcgcgcgtccggcgacatgccggtactggctccgatcgttgaaacggaacaagcagatagatgggggggggggccggcttgtttcttggcctacaaccagcggagtgaaaaaactttacaagctcccgtgctacaactgtttactc

SEQ ID NO: 5821 - DNA, 402 bp, Lilium asiatic
  Clone ID: LIB3230-048-P1-K1-D9
cggatgactcatctttcaccaccgaaaacacaagggattcgttcagcaccgtcgattatggggaaaccggtaccctcgacacaatttcatccatatttgctccttactacgtcccagagtatcctcagagcaacactgtgtcgtgtacaaagttctcgcctagtagggccgagacgagatttcatatggagagtaagggttgtgttttggattcttccatgctggctcaaccggtcggcagtgtacatacagggaggcatccagaatgtgcatcagctgagcagtttagcttcaggaactaactgtagtctgtatggtcgatttgggagtccctaggatggttttgttcaaatttatcgatattgtgataattaggtggtagatttcattagtttctagtta

SEQ ID NO: 5822 - DNA, 404 bp, Lilium asiatic
  Clone ID: LIB3230-048-P1-K1-E11
cccacgcgtccgcggacgcgtgggctcagaaaagaaacattttactctgacaacaatgttggcaagatgagaagtaatgatggatatcaattcatacacagtggaactatctcctcaacaaccactcaaacattaaaatttgctccgtcggatcctgcatctgtatgtgaattttatgcaagtcaaggtgctcaaaagggattagtccaaaatgaccgtcacataacagctgaaacagagatacctaggttagacaagactgttacagttactgacaagaagcttctaaaggatgtgtgctctgctgtcaaagatagtgatgctgtatcagggtcaaggttagaaaaggcaagggataatgccttgtcagttgttagatatggaggtgctgtctgggacatatt

SEQ ID NO: 5823 - DNA, 400 bp, Lilium asiatic
  Clone ID: LIB3230-048-P1-K1-E12
acttagggtttcaagttctcaacaatcaaggcgcaaaatccagtagatcaagatggtggagattctgttcgaggatatcttcactgtcacccagctcgatcctgatggaaagaagttcgataaagtgtcgagagttgaggctgtaagtcagcaattcgacatgcagatgcagctggatgttaatactgagatctatccccttagtgtgggggagaagtttacgatggttttggctccgacgctgaatttggatggaactcctgatactggatactttattcagggagggagaaaatcgcttgctgataaatttgagtatgtcatgcatggaaagctgtttaaaatctctgaagagtctgccagtggacctaatgtgaaagtggagatgtatgctttcttt

SEQ ID NO: 5824 - DNA, 404 bp, Lilium asiatic
  Clone ID: LIB3230-048-P1-K1-E2
atcccctctccgtctgagattccccggttgagagagatggggctcactttcaccaagctgttcagccggttgttcgcgaagaacgagatgcggattctgatggtcggtctcgatgcggctggtaagacgacgatcctgtataagctgaagctgggcgagatcgtcaccacgatccctaccattggattcaatgtggagactgtcgagtacacgaacattagctttactgttggggatgttgggggtcaggataagatcagacctgtgtggaggcactacttgcagaacacacagggactgatattcttcgttgatagcaatgacagagatcgtgtggtagaggcacgagatgagcttcacaggatgctaaatgaggatgaactgcgggatgctgtgttacttgt

SEQ ID NO: 5825 - DNA, 409 bp, Lilium asiatic
  Clone ID: LIB3230-048-P1-K1-E5
cccacgcgtccgcccacgcgtccggagattttttagcccatcaaattttatgaaatttgagaaagatgaatctggaagaatagcaatcctgccattttatctttatgtaatgagaacggtttcacttacccaagccagaattgatatgagtgaactcgatgaggattctgatggatttcttcaacctcatgaaatggagggttatataagaggtcttattcctaatttggcgcagctgcgtgacatgcctgctgcctttgttcagatgtattgtcgaatagctgcacacaaattctttttcttttgtgatcctcaaaggcgagggaaagcatgcataaagaaggtgctgctcagtaactgtctccaggagcttatggaattgcaccaggaaagtgaggaagaagttact

SEQ ID NO: 5826 - DNA, 301 bp, Lilium asiatic
  Clone ID: LIB3230-048-P1-K1-E6
cccacgcgtccgtggacgcgtgggcttataaaagaaacatattactcttacagcgggggtaggtaagatgagaagaaaagatggatatcaattcatacacagcggaacgatctcctgtaacaaccactcaaacattaaaattatgttccgtccgatccagcatcggtttgtgaatgttatgcaagccaaggagctcaaaagggattggttcataaagaccgtcccataacaggtgaaacagagatacctatgttagacaagactgtatcagttactgacaagaagcatataaaggatgggt

SEQ ID NO: 5827 - DNA, 298 bp, Lilium asiatic
  Clone ID: LIB3230-048-P1-K1-E9
aaaaaaaacaaaaaaaaacaaaaaaaaaaaaccccaaacaaaaaaaaaacagaacgaagtaacaaaaaaaaaaaagaaaaaaaaaaaaaaaaaaagaaaacacaaaaaacaaaaaacaacacaaaaaacaacaaaaacaaaaacaacaaacaacaaaaaaaccaaaaacaccaaaaaaaaaaaaaaaaaaaaaaaaaaagaaaaaaaacaaaaaacaaaaaacaaaaaaaaaaaacaaacaaaaaaacacaaaaaaaaaaaaacaaaaaaatcaaaaaaaaaaccacaaaaaaaacaa

SEQ ID NO: 5828 - DNA, 334 bp, Lilium asiatic
  Clone ID: LIB3230-048-P1-K1-F10
aggtgaaccaaagtttgatgaagcaaagagcgttgactctaaactgtcatgggagttcgctgtgaatggagaaatgtaatctgaaccatacgtggcatctcttggagcttctgaagggaaataaggcacttcatagttgttgagcatgatgggcgagatcagtttaagacgaggctcgtagtataaagctacgagcaaagtgtaggctgaatttcctcaagtattctctcccattgtgaagatttctactatccgtgtggttctgtgtattgtggcaagtgaatatttgcatatagagcaaatggacatgaagacgatgtttcttcatggtgac

SEQ ID NO: 5829 - DNA, 405 bp, Lilium asiatic
  Clone ID: LIB3230-048-P1-K1-F11
ggaaacatggcggagagcatcgcgagaggggttgtcaaatcgggcgtcatgccgccggcctggatccgcaccgctcaccgccgcccagagcgctcgaaggtctttgagtcgttcggggtcaagatcctcgagagtgactcccaggtagttgatgatagtgacatcattattctctcagtgaaacctcaaatagttaaaaaggtccttgtggagctaaaacccttcttgtcggaggaaaaagtcatagtctctatagctgctggaattaaattgaatgatttgcaggaatggtctggtcaacgccgagtaatcagagtaatgccaaatactcctgctgctgttggcgaggcagcatcagtcatatgcatgggggaaatggccagaaagaaagatgaagaacgtgta

SEQ ID NO: 5830 - DNA, 329 bp, Lilium asiatic
  Clone ID: LIB3230-048-P1-K1-F3
aagaaaaccaacatggctttgatcgtcggcatatacgatgagccaatgactcctggtcagtgcaacatggttgtggagaggctcggtgattatctctatgatcagggattttaggtccattttactcgtttttgtgtctacctttggcatgggtttgcatcttatctgttgatgtggttgaaatgctttgaaatggtccttggaaacttgtaggtagtgtgttggcatggtgtcttgttggactctggatttctctcctgtggtttcaaggtgtttgagtatttgaagtgggaaaaaaaaaatataatttatttctaattaataaatat

SEQ ID NO: 5831 - DNA, 410 bp, Lilium asiatic; identical to SEQ ID NO: 5185
  Clone ID: LIB3230-048-P1-K1-F5

SEQ ID NO: 5832 - DNA, 404 bp, Lilium asiatic
  Clone ID: LIB3230-048-P1-K1-F7
gaaagaagctgctgatcagtcgatgaaagcttatcaggctgcttccaacacagccaacactgatcttccctcgactcatcccattcgactcgggcttgctctcaatttctcagtcttctattatgaaatcatgaattctcctgaaagggcgtgccatttagcaaagcaggcctttgatgaggcaattgcagaactggacaccttgagtgaggagtcgtacaaggacagcactttgattatgcagttactgagggacaatctcactctttggacttctgacttaccagaggatggaggcgatgatggtttcaagggcgaggaggccaaagctgctggtgatgatgagcactagtaatgactgcttttaactcccgtcttggagatttctagtagtggcggataat

SEQ ID NO: 5833 - DNA, 293 bp, Lilium asiatic
  Clone ID: LIB3230-048-P1-K1-F9
ctagaaaaccaacatggctttgatcgtcggtatattctatgagccaatgactcctggggagggcaacatggttgtggagaggctccttgattatttatatgatcagggattttaggtccaatttactcgtttttgaggcttcctttggcatgggtttgcatcttataatttgatggggttgaaaagctttgaaatgtgtcctatgaaacttgctggtagtgtgttgtcatggtgacttgttggaccctggatattttttctgcggttttaatgttgtttgtgtgtttgtagtg

SEQ ID NO: 5834 - DNA, 412 bp, Lilium asiatic
  Clone ID: LIB3230-048-P1-K1-G1
ctccccacccctagggtttcctcctcccctcaaattttctctccgatcaaatcaatggcggcggggggagagtcgtcggcgaagaagatcacgttgaggagctccgacggcgacgagttcgagatcgatgagatcgtcgccatagagtcgcagacgatcaagcacatgatcgaggacgactgcgctgagaacggcatccccatccccaacgttaacagcaagatcctcgccaaggtaattgagtacagcaagaagcatgtcgagttggcgcccaagggtgctgacgagaccgctgacaaggcgaacaatgacgtgctgaaggcttgggatgctgagttcgtgaaggttgaccaggctaccctcttcgacctcattctggcagctaattatctgaacatcaaagggttgctgg

SEQ ID NO: 5835 - DNA, 387 bp, Lilium asiatic
  Clone ID: LIB3230-048-P1-K1-G10
cccacgcgtccggagactttctcattcaaggatgaaaaggaagatgttgtcttttgctttgataggattttctatccgaattcagctcaggctgatgtctatgagtttattgctctacctatagttcaagatgctgtcaatgcaataaatggaaccatcatcacatatgggcagactggagctggaaagacatatagcatggagggtcctagtattttaagctgtgatgagcgtaacaaaggactacttccacgagttgtcgatgggatttttgaatgtttgaagttatccactgaaatcatcacatatgatgctaagtggtcgatggtggagatctacatggagaaaataagagatctttttgtttattaaaagacaacctacaga

SEQ ID NO: 5836 - DNA, 152 bp, Lilium asiatic
  Clone ID: LIB3230-048-P1-K1-G11
tcgcccacgcgaacggtgactttcttatttaaggatgaaaaggaagatgatggggggggcttagataggatatattatcccaatatatcccacgctgaaaactatgattttatttggcgctcctatatgtaacgaagcggttaatgcaataa

SEQ ID NO: 5837 - DNA, 391 bp, Lilium asiatic
  Clone ID: LIB3230-048-P1-K1-G12
ggacacacctcgaacccctgagtcttttccccttgtcaattttgcacaccgtggcatttgcgagatcggactaccttttcccttatcggcaagctccggtcaccttttccgagcaatacatgccgtcgatcgctagagctactataggattcgatgagtaggatagttctagaaggtgccatagaggacacgaagctgacaaaagagtcgagagtcagtggattgtttgagcgattcagtagaagggtctggatgctgtctgtgggtctctataaaaaggggatcaaagagaagatgaactcctcttcgactcttcagagatctcatccagagactctgaggtctcttctctcccccacttgaggcatagccgcgagggtgaggtgctggt

SEQ ID NO: 5838 - DNA, 410 bp, Lilium asiatic
  Clone ID: LIB3230-048-P1-K1-G2
cggacgcgtggggtcatcaatgactatgactatgtattctctgagaatggtcttgtggcttacaaaaatggggagctgctcggtacccagagtttgaaatcattcctcggcgaagaaaatctcaaggaattcatcaattttactcttcgttatattgccgacttggatatcccaataaaaagggggacgttcatcgaattccggagtggaatgctcaatgtctcacccataggccgaaactgcagtcaagaagagcgagacgagtttgaaaagtatgacaaggttcacaatgtaaggtcaaagatggtctctgtgctccgtgaaaaatttgcacacatgaacctgacattctctatcggtggacagataagttttgatgtgttttcccatggctgggataagacatactg

SEQ ID NO: 5839 - DNA, 408 bp, Lilium asiatic
  Clone ID: LIB3230-048-P1-K1-G3
cggacgcgtgggcggacgcgtgggttgaaggggaatgtggaggaatcgggcgtggaggagtgcgatccatcgaataggtgcattgatgagaagaacatgtttgttgcttgcttgagagtccctgggaaagattctctagacctttcgcttctgattgagaacaaaggaacgggttcccttgatgttaacattattgcccctagttttgtaaaactagaaccagcgacagttcaacttcaatccaaagaaaacaaagaggtcaaggtgtcggtgcaagatggtgcaaatgacaccatgatagttctgaaagccggagaaggcaattgcagcctcaacttcataaacatgataaccaattccccgaggagtgagaagacatcgtttggatacaccagactatcgacacgc

SEQ ID NO: 5840 - DNA, 404 bp, Lilium asiatic
  Clone ID: LIB3230-048-P1-K1-G4
cggacgcgtgggcttccatcatgtcgaagcgagggcgtggaggatcggcggggaacaagttccgtatgtcgctaggtctgccggtggcggcgacggtgaactgcgccgacaacaccggggcgaagaacctgtacatcatctcggtgaaggggatcaagggccggctcaatcgcctcccttcggcttgcgttggggacatggtgatggcgactgtgaagaagggaaagccggatctgcgtaagaaggttatgccggctgtcatcgtgaggcagcgcaagccgtggcgccgaaaggacggggtctacatgtactttgaagataatgctggagtgattgtgaatccaaagggtgaaatgaaaggttctgccatcactgggcccattggaaaagagtgtgctgatcta

SEQ ID NO: 5841 - DNA, 401 bp, Lilium asiatic
  Clone ID: LIB3230-048-P1-K1-G5
ataacctcgagaaagtaatgcaggtttatgaaaggatgcggatggaaggcatcgaaggcaaccagactatctttactaccatcatggacgcccacggtaaaaactctgatttcgggagcgctactatatggtataaagagatgaatgctcggggacttgaacctgatcagaaagcaaagaacattttactgtccttggctaagacggcagaagagcagaaggaagccaatgagttagcaggcaatgctgttggcgaccttactgatttcagcaataatgcggtcagtacgagtaatccagtcgctattgaggaaaaacaaactggcgctgatctaaatgaaggaaatgtcagcgaatttgattctgacgatgataacgaggatggtgacgatgattacaac

SEQ ID NO: 5842 - DNA, 409 bp, Lilium asiatic
  Clone ID: LIB3230-048-P1-K1-G6
ggcctggaccgccgtgtctcgtgcgcttgcactgccggccgtggacctccgcctcccccgcgcgcgggccccactcgccgccggcgtatgctgcgcatccctcgtcgccttccgcctccgatcgccgcccttcgcccgcgccaccgccgccctatcctcctccgccgccgattataaagtagccgttcaaacagagaaggcccctgcagcactgggaccttattctcaagctattaaagcaaataaccttctttttgtctccggtgttcttggtcttgttcctgagacaggaaaattcatctctgatagtgtcgaggagcaaaccgagcaggttctgaaaaacatgggtgaaatactgaaagctggtggtgctagttattcttcagttgtcaagacaacaatcatgctt

SEQ ID NO: 5843 - DNA, 223 bp, Lilium asiatic
  Clone ID: LIB3230-048-P1-K1-G7
ggcaaggacaaacttcccgactgcatgatcgtctgcagtatactctgagagaggtagatggaagcaaggcatggcatatagaaaggctggccccttgagcagtatttccttggactacatatacatttttatcatgcaatagcatgtaatccctcgcttgcaacattgttttctggtgaaggattcgaacctgggtggacccaaatttgagcaatattttcct

SEQ ID NO: 5844 - DNA, 402 bp, Lilium asiatic
  Clone ID: LIB3230-048-P1-K1-H1
ctccctacccctagggtttcctcctcccctcaaattttctctccgatcaaatcaatggcggcggggggagagtcgtcggcgaagaagatcacgttgaggagctccgacggcgacgagttcgagatcgatgagatcgtcgccatagagtcgcagacgatcaagcacatgatcgaggacgactgcgctgagaacggcatccccatccccaacgttaacagcaagatcctcgccaaggtaattgagtacagcaagaagcatgtcgtgttggcgcccaagggtgctgacgagaccgctgacaaggcgaacaatgacgtgctgaaagcttgggatgctgagttcgtgaaggttgaccaggctaccctttttgaccttattctggcagctaattatttgaacattaaa

SEQ ID NO: 5845 - DNA, 408 bp, Lilium asiatic
  Clone ID: LIB3230-048-P1-K1-H3
catgactcgaatgcgccttctcggctcttgtctgtcatagcagaacaggaggggatacaattaaaggctattgacttgtacccatttcttgacttcgtcaaacggaacaatcttcagatggagtacttctttattggaccaaaccaatatatagtcacatcgatacacgagcattggttctgtgcacggtgtgtaaatacttcgaaaccagcgggtgaaggtgttatcgtcattcatagcggatcctatcttttggtcgcaatgtacgaagcttcaatcagctcggcatccagagcaatggtggctgcggatcagttcatatggcagctaagtcgtagaaataattagtcacataataactgtaaattatcgcaaggatttgttgcatcatctgtgaatgttgttagc

SEQ ID NO: 5846 - DNA, 164 bp, Lilium asiatic
  Clone ID: LIB3230-048-P1-K1-H4
catgactagaaagcgcctaatcggctcttgaatgtcatagcaaaacatgacgggatacaattaagggatatccgacttgtacccattttaatgacttagaaaaattgaacaattttcaaaaggagaactcttttatagcactaaaccattttatagtcacatca

SEQ ID NO: 5847 - DNA, 160 bp, Lilium asiatic
  Clone ID: LIB3230-048-P1-K1-H5
tttcacataccatctacaccgtcgtgccagtggtcccttctattggacctacccccagatgcggcggagaatatgcaagcgctcagcaccttctaactctgagacatcgcttacgagctcttcctttttctatatataatattattgctttttcttatgg

SEQ ID NO: 5848 - DNA, 410 bp, Lilium asiatic
  Clone ID: LIB3230-049-P1-K1-A11
atctcaactcagcagcagcagcagcaatgtcgggccgcggcaagggcggtaaggggctcggcaagggtggagcgaagcgttaccgcaaggtcctccgcgacaacatccaaagcatcaccaagcccgccattcggcgcctcgcccgccgcggtggtgtgaagcgcatcagcggcctcatctatgaggagacccgcggggtgctgaagatcttcttggagaacgtcatccgtgacgccgtcacctacaccgagcatgcccgccggaagacggtgacggccatggacgtcgtctacgccctcaagcgccagggccgcacactctacgggttcggaggctgatcgatcatctagggtttggttttggtgctatgtttggatgtggatcggaacttgggttatccttttattttg

SEQ ID NO: 5849 - DNA, 372 bp, Lilium asiatic
  Clone ID: LIB3230-049-P1-K1-A2
ttgactgtgaccagcacaagggtgtatgcagcaaattcagtgtttcagggtacccgactatccagtggtttgctgcaggctctttggagccgaaaaagtacaaaggtcagcgtactgcataagcccttgcataatttgtgaatgccggaggaggaactaatgttaaactggcagctattccatccagcgtagtagtattgacatccgagaactttgatcaaatcgtcctatatgaaaccaaagacgtcattgtagaattctatgcgccatggtgtggccattggaaaaaccttgcccctgtttatgagaaagtagctgctgctttcaagctggatgagaatgtttgttatcgcttaccctgatgcaaacaaa

SEQ ID NO: 5850 - DNA, 390 bp, Lilium asiatic
  unsure (1)..(390): unsure at all n locations; Clone ID: LIB3230-049-P1-K1-A5
ntccgtttactntttcgggtcttggtgcctctggttgcctctttttggtgaccgtcaggccattggtagcgctatcgattctcttcctgtgtttccgaaggcgatggaagttggtggtcttggcttcaccgtctggttcagtgctcggtatctcgtctttaagagtagcagggatgaattgctggcacagattgaaagtctgaaggagcatattatcggtccatcagacgactaaagacatcggctatgttaccatagttatttgtgtatgtgcccacctaggaagagttatgtagtcagttttatatgttatttcattttattaaggcttgcaagtgtaggaaatttcctctgaacttgccaactttggttgggtattgaggacttgat

SEQ ID NO: 5851 - DNA, 359 bp, Lilium asiatic
  Clone ID: LIB3230-049-P1-K1-B5
ttatttttaaatttattttcttatttaattttttttgttgttgtgttatattttattttttttatttttttattatttttttttttttttttttatttttttttttttttgttatttatttatttttattttttttttttttttttttatttttttttttttttttttttatttttttttttttatttatttttttttttttttttttttttttattattttttttttttttttttttttattattttatttttttttttattttttatttttatttttttttttttttattattttttattattatttatatatttttatttttttatttttttttttatttttttttttttattttt

SEQ ID NO: 5852 - DNA, 292 bp, Lilium asiatic
  Clone ID: LIB3230-049-P1-K1-B8
gcaaaggtcattatgggtttgcttaagaatgctgagagtaacgcatatatgaaagggttggatgttgctgccctctacatatctcatattcaagtgaatcaagctcagaagccaaggcgccggacatatcttgcccatgggcggatcaaccctcttatgtcctagtcttgccacattgagctaatcttgtctgagaaggtagagccagtccagaaagagcctgaaacccacattgcccagaggaagcccaagaaagctggagttgtccgtagagctgcttcatcttaaacca

SEQ ID NO: 5853 - DNA, 375 bp, Lilium asiatic
  Clone ID: LIB3230-049-P1-K1-C11
ttccttaaagccttattgctcccattggtttaatcttggtgatggggcccgtgacctgggccaaccatgttacctgacatggatctctgggtcatcgttcatcattgagagggataatttgaagaaaattaaaatgcagacatggaccataccgagatttaatttccaatatcgcttaacttggcagagagaggcaatcaatgacttaattgaaaagtctattctagaagctgaagaaaaaggagttaaaagtcttaagttagggcttcctaatcaggcaaaagaagctaatgggggtggtgaactttatattcaaaagtatccaaaattgaaagtaaaaattgtcgatgggaggagcttactgactgcttttgg

SEQ ID NO: 5854 - DNA, 365 bp, Lilium asiatic
  Clone ID: LIB3230-049-P1-K1-C3
ttcaaagccaaagagctcaaatcagctctattaagtggaccaagcacgaaccggatatcggcagtttattctttcggcgtctgcggccttgggaggacttctcggactctggtcttgattgtccttacttttcgggtaccatgggaaacggtcagattctcttgttatcgaaaacatgtaaagatgagggtcggttgctcacatatgacatggattgaaaaatgcctgataactttacacatttttgagagagcatttttcaagccctacactagggaggagtgctggaccagcagtgttcatggcaactcccttattccttgtttttacccgggaggttttagaagagggaatttcaagggttt

SEQ ID NO: 5855 - DNA, 258 bp, Lilium asiatic
  Clone ID: LIB3230-049-P1-K1-C4
cacccgtagcagctgcggcgagatggtgaaagcgatcagagtgcacgagctcggcggccccgagtcttgaagggggaggatgtgggagataaggagagccccaaggattggagaaaattcgggtgaaagaacacaagcaattggtgtcaaacttcattgatgtttattaccggaaagagtgtacaaaaccccaattgccattttactccctgaaatggaaacagttggagtggaactgcggttggccctggtctgact

SEQ ID NO: 5856 - DNA, 211 bp, Lilium asiatic
  Clone ID: LIB3230-049-P1-K1-C5
aaaaggaaaaaaaaagaaaaatgaaaaaaaaaaaagaacaggaccaaccgaaagaacaacaaacgaaaaaaagcaaaaaaggaacaagacaaaagaaaaacaaacaaaacaaaaaaaaaaaaaaaagaaaagaaaaaaacgtaacagaaaaaaaacaaaagaagggaaaactcaaaaaaaaagaaacaaaaaagaaagaaaaatgaaataa

SEQ ID NO: 5857 - DNA, 374 bp, Lilium asiatic
  Clone ID: LIB3230-049-P1-K1-C6
tcggttcaaggagggcattcgtcggttgtgggaggattcggcgaattgcaacgaggggaagtggattataaggttcaagaaggcggtttgacgatattatacacattttcattaccttgcatatttttggtaagtcagtgaatatcatgttgtcttgattttttgtgttctacagtgggctaaagaaagagattcaaaaccttaccctcacaaagaattaccggagaagcctctatccggcatgatgatctcactctcggggcgactctcacgaaaacatgaagataaaaagagagaaattgagaagaatggagggaaagttaataactcagttcttggagtgacctggctagttacctctgctgccgagcggg

SEQ ID NO: 5858 - DNA, 307 bp, Lilium asiatic
  Clone ID: LIB3230-049-P1-K1-C7
aaaaaaaaaaaaaaaaaaaggaaaagaaaaaaaaaaaaaaagagaagaaaaaaaaaagaaaaagaaaaaaaaaaaaaaaaaaaaaaaaaagaaaaaaaaaaaaaaaacgaaaaaaaaaaaaaagaaaaaaaaacaaaaaaaagaaaaaagagaaaaaaaaaaaagaaaaaaaaaaaaaaaaaaagaaaaacaaaagaagaaaagaaaagaaaaaaaaaaaaaaaaaaaaaaaaaaaaaaaaaagaaaaaaaaaaaaaaaaagaagaaaaaaaaaaaaaaaaagaaaagagaaaaaaagaaggaaaaa

SEQ ID NO: 5859 - DNA, 318 bp, Lilium asiatic
  Clone ID: LIB3230-049-P1-K1-D11
cggacgcgtgggtttttcagttacatcagaacatgtagatcctgttaaggaagcacctacaagcaccgctcaacgaaggtcatcccaggggtctccactaaggaagtcagctagtgttggtgattggttagttaactcgaaacaaatgcctatcagccagaactccaaggagatgaacaacagttcggtacctgcatcacttctgatgcctcacctacaaaatctttttcagcagacttcatttcaacaagatcttataatgagtctgttgagtagcttgcaacaaaatgagtcagctgatgatttacaaagtgcagt

SEQ ID NO: 5860 - DNA, 316 bp, Lilium asiatic
  Clone ID: LIB3230-049-P1-K1-D6
aaagttgaagaatgtttcatgggcaattgcaggcttggccttaaagcgaagtgcagtggggaacactgaaatggatgcaaagtttactcccattcccattgacccgagtcaatttcatggttccttgaaccgagggaaaactgaaactgaaaagaactgctggactattccaagtggacaagaatttatgataagaggaaaaacttacttagtggatcatactaaggttgtgggtggagatcccttactgaagctgttagctgttgactggttcaagtctgataacatcattgataagatttctttgcattccaat

SEQ ID NO: 5861 - DNA, 385 bp, Lilium asiatic
  Clone ID: LIB3230-049-P1-K1-D8
gggcctttgtcatgtcgggtgagctcgcatggcaggtcatctgatgctcaataaaaatttgattgttgtgttgcgaaggggagatcgcatggggtcgtccccggggtctccccctctgtgtcttcttgttgttttttttagcttttccatgatttattttataggatatatctatcttggggtttcgcagtaaccacagtttattagcatgttaacgcaaccaatctaattatcctgaaaacaattataataccatgatataaattcgcttgtgaacatattttagactttagtaaaattatttaatttattcaatacacaaatattccgagcgttcatgtttctttaagtttattttagtaattgcgtttcacatttgttccca

SEQ ID NO: 5862 - DNA, 383 bp, Lilium asiatic
  Clone ID: LIB3230-049-P1-K1-E11
cgagtaaaaagtattacagggaaccctttgagccagtcatgcctggagtcacatttgtggagtatggaaacatccaagaagtcaaaaaagcaatacaacccggcaaaactgcagctgtttttgtggaacctatacagggtgaaggtgggatacatagtgtcacaaaggagtttctacaatcacttcgttctgtttgtgatgattctggaacactcctagtttttgatgaggtacaatgtgggttaggccgaacaggccgtctctgggcccatgaagcttacggtgtgacacccgatatcatgacgctcgccaaacctctcgccggaggcctgccgattggcgctgtactgatgactggaaaagtggcttctgcaatgagatat

SEQ ID NO: 5863 - DNA, 290 bp, Lilium asiatic
  Clone ID: LIB3230-049-P1-K1-E12
gtgctcgacgattggtgtgcctttggtttgttttgacaccaccaagaaacccaggcgggacctactagatgttgtgatctccaccgagggtttcgttagggcgattgtttttccttgccgggttgtggtatcggatcggtgccatcaccgctgtgcctggttgtgcagcgagtggtgccggatatcattacctggtgggattgcttctttcgcccacagttacaacaaaacaaaacatataactggttttcatgaacttgttctttaataaaacgctgattttaactctt

SEQ ID NO: 5864 - DNA, 404 bp, Lilium asiatic
  Clone ID: LIB3230-049-P1-K1-E5
gttgggattgctgatagatctgcttatgatttgcgtgctcatacggagaagagtggtgttgctctggttgctcatgagaagttcgcagaacctaaggaggttgagaaacttgttgtaactccatcaaagaaggacctgggtcttgcatttaagggtagccaaaagatggtggttgaagcattggaggcaatgagtgaatctgaagcccttgaaatgcaagctgctcttgattcgactggggaggtggaatttaatgtctgcactcttggtaaatctgttactataaagaaaaacatggtatcaattcgaaaggaaaagaagaaggaacaccaacgtgtgttcacaccttctgtgattgaaaccgctttcggaattggtcgaataatctactgcctgtttgagca

SEQ ID NO: 5865 - DNA, 390 bp, Lilium asiatic
  unsure (1)..(390): unsure at all n locations
  Clone ID: LIB3230-049-P1-K1-F3
tgtaaagacaggcgcaaacccacccaacccaggcccatccccttcatttnccgtgacacctccgacagtctgtgacgaatacgccacttgcccagaaagcaccacttgctgctgcatctacgacttcggcagctactgcttcggttggggatgctgccctcttgaagccgccacatgctgcgaggatcactacagctgctgcccacacgaataccctgtctgcaatgttcgtcagggaacatgtcaattgagcaagaataacccactgggagtgaaggcgatggtgcgcacgcctgctaagcaacactgggcgttttttggtgggattggcaagaagagcagtgtatgaaaagcgaggtgatggtgtgggaggtggagcgggctcgggat

SEQ ID NO: 5866 - DNA, 407 bp, Lilium asiatic
  Clone ID: LIB3230-049-P1-K1-F4
cccacgcgtccgccgctactgccgtggtgttccagacccaaagatcaggatctatgatgtcggaatgaagaaaaagggagtcgatgagttccctttctgtgttcaccttgtcagctgggagaaggagaatgtgtcgagtgaggctttggaggctgctcggattgcttgcaacaaatatatgaccaagtttgctgggaaggatgccttccatctacgagtgagggtgcacccattccatgttctgcgtatcaacaagatgctttcgtgtgcaggagctgataggcttcagactggtatgagaggtgccttcgggaagcctttgggaacatgtgcccgggttagcattgggcaggtccttctctctgttcgctgcaaggacaacaatgggaacaacgcacaagaagctc

SEQ ID NO: 5867 - DNA, 298 bp, Lilium asiatic
  Clone ID: LIB3230-049-P1-K1-F5
gcaactttctcgagtccgtttgtgtctgaactcaagttcgagttctgttgcatttaattttcagtgtacaagtataggtattcttagttcgttatgaaagattaaagtctacttgggttaagacacgattaggaccagccgttcattattttatgttgtgaataaaaaacgagtagaggtcgagtttgcttttcagggatgaacgtcatatattttttggcctctgcctctatctggtgcttttctctttgaagaaccctcaatccacaacctttgcttcaaaccccttaatccccca

SEQ ID NO: 5868 - DNA, 319 bp, Lilium asiatic
  Clone ID: LIB3230-049-P1-K1-F8
cttctgggcccgggaggggggctttcagaattggttcttccaagctcgggaggggggcttcaaaattattcttttcggggctcaagacaacctccaaaattttctcttcagtgcttgggataacctctgttttcttttcttcggggctagggagagcccgcaatttcttctctttggacctaaaaacgggccttggactacctttccctcttggaacaggaggaggtagttccaaaagcagcattgcaggaggagagacacatttcctcaaattcctttttattatttggcccttatcttgggaggtagatcccacatt

SEQ ID NO: 5869 - DNA, 409 bp, Lilium asiatic
  Clone ID: LIB3230-049-P1-K1-F9
cggacgcgtgggcggacgcgtgggcggacgcgtggggtggtttaccgaaactatgggaagaccttcaagaagccccgtcgcccctacgagaaggagcgtctcgacgcggagctgaagctcgtcggcgagtacgggctacgatgcaagcgcgagctgtggcgggtgcagtacgccctgagccggatccggaatgcggcaagggatctgctgacgctggacgagaagaatccccgtcggatctttgagggcgaggcgctcctccgccggatgaacaggtacgggctccttgaggaggggcagaacaagctcgattatgtactcgccctcaccgtcgagaactttctcgagcgtcgcctccagacccaggtcttcaagttcggcatggcgaaatccattcatcatgctcggg

SEQ ID NO: 5870 - DNA, 396 bp, Lilium asiatic
  Clone ID: LIB3230-049-P1-K1-G11
cggacgcgtgggcggacgcgttggccgcatcaaaatctgcaaatgcacggccaaagcataccattccccaaccatttgctcttgcaacagaaaaacgtgcttctgggggacctcggctatttgttgcttataatgctggaaatggagacagaactgctcaaccacagaacacttataagaaggcacataataacttaccttccgcatcatttgaagcctctggaaccacatgacgggaaacatatcgatgatgaggatgtttgctccattgcttcatcaactgccacatccatgagagctttcaaaacaagtttactacgggctcaaccccaacttttagaaacaagtggcgggcaaagaagcgaagggagttttactcaaaagtagaaaaaaaca

SEQ ID NO: 5871 - DNA, 341 bp, Lilium asiatic
  Clone ID: LIB3230-049-P1-K1-G3
cggcgcgtgggtcttggccctcccatctttcagctatggatggggaaggatgggcacctcattgtctgccagattgcacaagatgggttgagtgatgcagcatcagaggctgtcaaggagctactccctgattatgctaacaacgatctaagcagcctttgctcgtgggccgatgatggtaagttccatgtcaaatggtcttctatgctttactacattgacacaccagataaactctgtacatacaactataacagggactgttaaaaagagaaaggggagcccgttttgtgtgttgctggagcaataaacaactacactaatcaatgactcaccaaagg

SEQ ID NO: 5872 - DNA, 315 bp, Lilium asiatic
  Clone ID: LIB3230-049-P1-K1-G5
tgctcctgcgccgtcgttgtccgtccccgcttccgctccaaaatgggtatctcacgagactcgatgcacaagcgccgcgccaccggcggcaagaagaaagcgtggaggaagaagcgaaagtacgagctgggccggcagccggcgaatacgaagctgtcgagcaacaagacggtgcggagggtccgggttcgcggcggcaacgtcaagtggcgcgcgctccgtctcgacaccggttactttctcgtgggggagcgaggcggtgacgagaaagactcgcattctggatgtgatggacaaccgcttcgaacaatgagc

SEQ ID NO: 5873 - DNA, 346 bp, Lilium asiatic
  Clone ID: LIB3230-049-P1-K1-G8
ctttctttttaggttgaaatggcgacagctgagttaatgtccgccgcaatcgagaactcctcctccactgatgttccggcagcgaaaccggccaatccggcgaaggggaagtccctgaaggagaaaaaggcctccacgacaaagaagccagctctccatcctccttatctcgagatggtcaaggaggcaatcacatcgctgaaggagcggactggatcgagccagtacgcaatctcaaaagttgttgaagacaagcacaaagctcatctcccggcgaacttcaagaagctcctcctcgttcagttgaggaaaactcactgcttgctggcaaacctaaccaaacctc

SEQ ID NO: 5874 - DNA, 136 bp, Lilium asiatic
  Clone ID: LIB3230-049-P1-K1-H11
tccctcccaagtgggaacggtagagcccaaccctaaaaaaatggtcccggctaaaggattggtcccggaacaattgttaaaaaaaaaaatattcaagggattggaaccaaaaataaaattaaatttttttttaaaa

SEQ ID NO: 5875 - DNA, 398 bp, Lilium asiatic
  Clone ID: LIB3230-049-P1-K1-H12
ggcgaaacattgcttccgttgctgcagctgaggccctggaggaggccttggccaatgagtccatcatcagaagtttaagcatgttctctgatctctgttcgacctcaattcccggaaaccctttgtcagcgatcgaccgatttctgtccatctttagcgacgtagcgaaatcgagcgccatcgccgaatcactcgctgccagccgcaaaagcaatgcaaccgacaatgatgtgttcactgaatgcgggaaatccacatctctctgggtcgatgcagcattagccaccaacctagaaattctctctttactccaatgtgggactgaaactttattgagaggtgttgtccccgatcatcgcatgaccaagagggtttatgttaccggtcctgccaaaatc

SEQ ID NO: 5876 - DNA, 310 bp, Lilium asiatic
  Clone ID: LIB3230-049-P1-K1-H6
cgtccaagcattccccaatttcttctttcatctcctccgaggggaagctgtgtctaacacacgggacaatactatcggtgctatacggattgctcacgtagccttagtcatatagagcattctccatggtctcttcgagaatattatattcaatatacttgtataaatactgactcatctacctgcataagtcctgcataccgactgctacaacttaactacatgcggctttgtaagctacatcttctgaccttggtttttttagaagttgcagtaagtatttttaaccagtcctctttttttgggcctg

SEQ ID NO: 5877 - DNA, 406 bp, Lilium asiatic
  unsure (1)..(406): unsure at all n locations
  Clone ID: LIB3230-050-P1-K1-A7
cgattaccggtcggatcaagatcgacggtatttcatcaaaaggatttggctttcctgcaaaactatcaaataccaaagtcattctcannngtggtcagagggttacgtttccgagagcagatggttatttttcattccacgatgtacctgctgggactcatcttattgaagtagctgcattgggatatttcttttcaccggttcgtgttgatatcagtgctagaaatcctggtaaagtacaggcagcactaacggagaataggagaattcttcattaacctggttctagaacctttaagagaagaatactattttgagataaggggagcctttcttcataatgtctttactaaagagtccaatgggattgatgatgggtttcatgcttatcatggtgttccttatg

SEQ ID NO: 5878 - DNA, 399 bp, Lilium asiatic
  unsure (1)..(399): unsure at all n locations
  Clone ID: LIB3230-050-P1-K1-B10
gctgatttggcaaagggtcatccccatgcacaagcatgggatgatgctctaagcaaggcgaggtttgagtttagatggttggaccnnnntgctttgtcgttggaccctatgactgccatggcttttcacgatgaatctcttccatcagagggtgccaaggtggcccatttctgctctatgtgtggtcccaagttttgttctatgaaaataactgaagatgtgaggaagtatgctgaggagcatgggtacgggagtgcagaagaggttgtgcaagacggaatggatgctatgagtgcggcgtttttggctgccaagaaaactgtcagtggagaacagcatggtgaagttgggggtgaaatctatgtgccagagagttatgttaagcgccaataaaggaac

SEQ ID NO: 5879 - DNA, 183 bp, Lilium asiatic
  unsure (1)..(183): unsure at all n locations
  Clone ID: LIB3230-050-P1-K1-B11
ctcagtctttgtttaatctgtcaaaattgttgagtggttcactttacaattgtgacagattaaacaaagactgagcaaacactcattncaatcaagagatatagtgccgcaacaatgctgacgtgcaccacttaccaattgtaagcacattttgacacatgccataaacggtaagtatgtttt

SEQ ID NO: 5880 - DNA, 323 bp, Lilium asiatic
  unsure (1)..(323): unsure at all n locations
  Clone ID: LIB3230-050-P1-K1-B12
ctcagtctttgtttaatctgtcaaaattgttgagtggttcactttacaatttggacagattaaacaaagactgagcaaacacttnnnnnagaatagagataaacggtctgacacaatgcgtgacgtacccgcacttaactattttgatgtaattgtttacacaggccattataacggcaattttgttttttctgtaaaaaataaaaaaaagggcgtgcctttttatgtagatccatagcttactttacgctgtgcttgctgatcattatagctcttttttttagtgtcacctgaaatattaatactactggcctgtggttatt

SEQ ID NO: 5881 - DNA, 412 bp, Lilium asiatic
  unsure (1)..(412): unsure at all n locations
  Clone ID: LIB3230-050-P1-K1-B4
gcagctcgccaccaaggcggcgcggaagtcggcgccggccaccggcggcgtgaagaagccccaccgcttccgccccggcacggtggcnnnnntggagatccgcaagtatcagaagagcacggagctcctgatccgcaagctccccttccagcgcctggtgagggagatcgctcaggacttcaaggccgacctccgcttccagagctccgctgtctcagcgcttcaggaggcctcggaggcatacttggttggtctgtttgaggacaccaacctgtgcgccatccatgccaagcgcgtcaccatcatgcccaaagacatccagcttgcccgccgcatccgtggcgagagggcttgaaatttctctctctgtttgttcctccttggggtggtttctactgtctcgtagaaagtt

SEQ ID NO: 5882 - DNA, 402 bp, Lilium asiatic
  unsure (1)..(402): unsure at all n locations
  Clone ID: LIB3230-050-P1-K1-B5
gaagaattcttcttgaactctttaggacaaaagcacgaggctttacctgttcttctgttgtcctggaacgtaacanannnntttgctgcgtagggagcccgattctatccaatccagtatttccaaaatcttaaactaattctgcctgtttcagttcggccgctcgtgggtacatatcctactttttgagaggccaagagtcgtagccggctcagttgggtcgctaatatccgaaacatatggtctctgatccaacgtattgaggtggatttggaaagttccaaattctgaaccatgttatgctggaacggaattttgggtgtttagttttgtttatggatctcagccaatatatgtaaagatgtcttttgtattttggttgtttgaagtaagtaagacaaa

SEQ ID NO: 5883 - DNA, 393 bp, Lilium asiatic
  unsure (1)..(393): unsure at all n locations
  Clone ID: LIB3230-050-P1-K1-B8
cggacgcgtgggcggacgcgtgggcggacgcgtggggttgaaggctgaggcaaaggctcgtggtgaggtgatcagcacaaagcgccagnaacagggtccgaagccgggtttcatggtagagggggcgaccctggagactgtcactcccattccctatgatgtggtcaacgatctcaagggcggttactagatttatctatcttttgttctgggttttacttaactggcttgaatttaatcatttctaggctggaaccatggttttgttatctgtcttttgtgactttttcttatcttcgagacatcttaaagtcattgttgagtcttaaattgtgtcctcttttttcaaataattttattagggatttaccttnnaaaaaataaatctattat

SEQ ID NO: 5884 - DNA, 66 bp, Lilium asiatic
  Clone ID: LIB3230-050-P1-K1-C11
tcgctagcgagatccgtgatatttatccccgcttcacctaacctcaccaaacggggggggtttcaa

SEQ ID NO: 5885 - DNA, 412 bp, Lilium asiatic
  unsure (1)..(412): unsure at all n locations
  Clone ID: LIB3230-050-P1-K1-C2
atctcccttgtgcacttacactataagctgacaatgcggagtttcctgcaaggtgggcattaagcaaaatggcaaacaaacttcggnnnnnnaactatattgggagcataaccagaggaacaatcgacccaaatagcctattagacatacaagctaagcgcatacactaatataacaggcacctgctaaacatccttgatgctgactatagatacaagacactgaaagaaaagagcatggaacagagaaaaaatgtgacaccacggactatcatgctccgacgaaacgcacactgagcctataccattgctaaaaaaatatttaaactggtgaatgaggttgctgctgtgcacaacaatgattcttaaatcaacagctatttcaaggctgtgtccgtaccaaactacaatgt

SEQ ID NO: 5886 - DNA, 379 bp, Lilium asiatic
  unsure (1)..(379): unsure at all n locations
  Clone ID: LIB3230-050-P1-K1-C5
ggaggaagaagaagaaagcgacgagggttgtgtaccccttcacattggtgaagtctggagggatcgatggtgacgtgactctggccgacannaatgagaggatactcaggcgaccgagcaggccggtccggcaccctgtcggggagttcgcctgcgctccctgtgtctcctccacctcggggccggggttgtcgggaaaggatgttgtagggctcacaaggatttattactcataatgggaggggcaccattacaattgtaagaacaagagggtaggttaatggtttagttggtgcatggtgtagcatagaattgagtgtaagctcaatatgtatatgtgtaatattaaccagtaataatgaactataacaacttaagt

SEQ ID NO: 5887 - DNA, 413 bp, Lilium asiatic
  Clone ID: LIB3230-050-P1-K1-C8
attgggagctaccagatttatgctattccggtgtttgacatgatggaaacgatgctggtaaagaaacttaattttacacctggacttcgactccgcttgatttcacgcagtctatatgtcgcattcacaatgttcatcggtatgacattccctttcttcggtgggctactttcatttttcggaggatttgtgtttgccccgacaacatactttcttccctgtatcatgtggctcgcaatttacaagcccaaaaggtttggtttatcttggacagtaaattggatatgcatcattatcgggtttttattgatgaccttggcgcccattggaggacttcgtcaaatcatcatcgatgcaaaaaattacacattttactcatgagcaacaaacctggattcaaattaatcaattgg

SEQ ID NO: 5888 - DNA, 414 bp, Lilium asiatic
  Clone ID: LIB3230-050-P1-K1-C9
cgatcgtgggcggcggcaatcatccccgctccaccgaaccccaccgcccgccccatttcccaatcccccgatcctaagcgccacagagcaatgggcgccggtcgagagatctcgctcgacgaagtccgcgacaagaacgtgatgcaactcaagaagctcaacaccgccctcttccccgtccgttacaacgacaagtactacgctgacgccctctcctccggccacttcaccaagctcgcttattacagcgatatttgcgtcggagcgattgcgtgccgactggagaagcagccgggaggcgctgttcgggcgtacatcatgaccttgggagtcttggccccgtaccgggggctgggcatcggtacaatgctgttaaatcatgtgttagatctgtcctcgaagcggaacatcttc

SEQ ID NO: 5889 - DNA, 412 bp, Lilium asiatic
  unsure (1)..(412): unsure at all n locations
  Clone ID: LIB3230-050-P1-K1-D10
gaagaaacagaggctgccaagaagcttctgcaagagaagaggctcgcgggtagaactaagtcggagctgaacatcccctcgagtnnnngggctgattacttccagcggggccgggattatgctgaaaagctacggagagatcatccagaactgtacaaagaaagaggagcacaagttgatgacacgggaatcaagccagccgaaagcaataaccaggaaaatccaggacggaggcaagccgccacagatgagttaatgctcgagcgtttccgcaagcgagaacgacatcgtgggcgtaggtagcattagaagtaagagtacatcatattgactgttatggattgcctctagatgacttgttccatacattttactttccgaactactgcattcaatctgcgaggtgctctga

SEQ ID NO: 5890 - DNA, 364 bp, Lilium asiatic
  unsure (1)..(364): unsure at all n locations
  Clone ID: LIB3230-050-P1-K1-D11
gagagagatggtcgcgaacaatgctagcccagctgcgccggcacctatttgctggccgaggaaaaccaggagtgtcacctcctncaaanttgtggcgctggtgtctgcgccagcgaaagctgaggtcgccaataaagtgaaggctgacactgcgaatgctatgtaccaggagccttccaggtcgaacgccaaggatcctggcgtggcaccctaggacgaggggtcggccaacaccattattagcgggggctgcacacaatgttcttccttgcagataagggctgatgcaaggactaacggtttagaaagcgctttcactagactcactgttgttattaattctgagacatcactgcgatgatgc

SEQ ID NO: 5891 - DNA, 376 bp, Lilium asiatic
  unsure (1)..(376): unsure at all n locations
  Clone ID: LIB3230-050-P1-K1-D12
gagagagatggtggcgaacaaagctagcccagcggcgccggcacctatttcctggccgaggaaaaccaggagtgtgacctggggcnnnnggttggcgctggtgtctgcgccagcgaaagcggaggtcgccaaaaaagtgaaggctgacacggcgaatggtaaggacaaggagccgtacaggtagaacggcaagggtccaggcgtggcaccctaggacgaggggtcggccaacaccatcatagccgggggctagaaacaatgctcttcctgtcagataagggctgatgcgaggactaacggttgagaaagcgctgtcactagactcactgttgttattaattctgaaacaccactgcgatgatgcttagagattcgc

SEQ ID NO: 5892 - DNA, 241 bp, Lilium asiatic
  Clone ID: LIB3230-050-P1-K1-D3
ccccccacgtccgatcccggcgccccgcgtcggttgtccgtctgtttgtccaaaaaaggctgtctggagcgggggttgatattcacgagctttccccagctcgtggctcagatcatatacggatgtgatgataccgttgtagtgcaagctttgtgtgtatttgtcatggtttaataattcagacccgcgaggatgggcaacatactgagcttggggctaagcgagtaccttcactgtccgt

SEQ ID NO: 5893 - DNA, 409 bp, Lilium asiatic
  unsure (1)..(409): unsure at all n locations
  Clone ID: LIB3230-050-P1-K1-D4
cttgatgtctacaagttcttttctgggctcgatgtcgttgactgtttgctggtgaataagaatgggcgtttctctggtgaagcctttgnnnttttctcgtcacccatgcagtgtgagcatgctcttcagagggataggcagaacatgggtcgcaggtacattgaggtcttccgttgcaagaagcaagattactacaatgcaattgctgctgaggtgaattatggggggtcctttgacaatgaaaagcgccaggcttccccgcctgaacgcccgaagaaagcttccgaaaacaaggaacatatggagtacactgagattctcaagctgcgcggtctcccatactcagtagcgaagtctgaaattgctgagttctttgaggagtttgaggtcactgaagataatgtgcaca

SEQ ID NO: 5894 - DNA, 413 bp, Lilium asiatic
  unsure (1)..(413): unsure at all n locations
  Clone ID: LIB3230-050-P1-K1-D6
aaagattcgagtccgatgctgaggaatggtgagacgggggactggatcgggacgttcgaggggcacaagggtgctgtgtggagttgcnnnnntgataccaaggctttgcgtgcggcttcgggatctgctgattttactgcaaaaatatgggatgccttaagtggagatgagttgcattcatttgaacacaagcacattgtccgaacatgtgccttctccgaggattcccatttgttgttaactggaggtatggaaaagattctgcgcatatatgatttgaaccacccacaagcaccgccaagggaagttgacaaatcacctggttcagtcagaactgcagcttggtttcacagtgaccaaactatattaagttcgtgcacagatgttggtggtgtgaggatgtgggatgtaag

SEQ ID NO: 5895 - DNA, 413 bp, Lilium asiatic
  unsure (1)..(413): unsure at all n locations
  Clone ID: LIB3230-050-P1-K1-D7
agtccctcttgacagagaagaaagaacacaaagaatttgaaatatttgttggtaaattggacaaagaagcagttgaggatgatttannnnaggtctttggtgtgtttggggagatcaaatctgtaagaattgttaagcacccgtctacacagaaaagtaagggatttgggtttgtacgttatgtgagtatggaaaatgccaggaaagctcttgctgagttaaaagatggggtggaggtgaaaggcaagcaagccaagatatcagctagtaatgacaatgataccctttaccttgggaacatctgcaagacttggacaaaggataatgttatggatgcattaaaaagctatggtgtcgatcagctagagagtattgttctgccagacgattctaagaaggatgggaaaatcaaa

SEQ ID NO: 5896 - DNA, 407 bp, Lilium asiatic
  unsure (1)..(407): unsure at all n locations
  Clone ID: LIB3230-050-P1-K1-D8
gtcctcaattctctcagatctctcactaatggcgcccaaggccgagaagaagccggcggcggagaagaagccggccgtcgaggaggannggaaggcggttccggcggagaagaagcctgctgagaagaagcccaagggcggaaagaaggtcccggcctcgaaggagggggcctctgacaagaagaagaagaggtcgaagaagtcggtggagacctacaagatctacatcttcaaggtgttgaagcaggtccaccctgacatcgggatctccagcaaggcaatggggatcatgaacagcttcatcaacgatctctttgagaagatggctcaggagtccgcccgccttgcttgctacaacaagaagaacaccatcacctttcgggaggattagacttccctgcggcttg

SEQ ID NO: 5897 - DNA, 409 bp, Lilium asiatic
  unsure (1)..(409): unsure at all n locations
  Clone ID: LIB3230-050-P1-K1-D9
gaacggtacagcggtggatctgaaggcggcgtttcgggaggtgtactcgcagctgaaatcggagctcctcgaggatcccgccttngncttcaccgaggattcgcgatcgtggatcgagcagatgctggactacaatgtacccggagggaagttgaaccgagggatctccgtgattgatagctacaagttgttgaaagaagtaaatgaactcagcaacgatgatatttttcttgcaagtgcacttggttggtgtattgaatggcttcaagcatatttccttgtcctcgatgatatcatggacaactctcacacaaggcgaggtcagctttgttggttcagactacccaaggttggccttattgcggcaaacgatggcattttactccgtaatcacattccgcggattctg

SEQ ID NO: 5898 - DNA, 414 bp, Lilium asiatic
  unsure (1)..(414): unsure at all n locations
  Clone ID: LIB3230-050-P1-K1-E1
gcgcggcgctccccgccgccgcctcaggtctcagcgcggaggaccgcgcggggctcgtcaacgccctcaaggataagctgcagagctnnccggggaagcactcggatgtgatggagaatttgtcggagaaggtgcggaagcgtgtagaggccctaaaggagatccagagccaacatgatgagttcgaggcaaaattcttcgaggaaagagcagcacttgaagccaaataccagaaactatatgaaccactatataccaagcgctatgaaattgtgaatggtgtggtcgaagtggaagatgttatgactgaaactactgaagcaactgctgaggataaaagtagcgaagaaaaaggtgtgccagatttttggttaactgcaatgaaaaccaatgaggtgcttgctgaggagattc

SEQ ID NO: 5899 - DNA, 387 bp, Lilium asiatic
  Clone ID: LIB3230-050-P1-K1-E11
ggaccttttcaatggacgaagtgggtgttgcaagctgaaggatgtacctgtctgaaacaggtttactttgatggtgggaactgggacaatctgtatggttttctgcttccatgaccgtcttctgttttgtctctgttcgtcgatatcctccctgcaaacaataaaatgattattgaaccatgcgagagggggatagtgtaaaatgattgagaatttttgctttttcagtctggaggagtcagccaaaggcaccattgtgtgatttaagagatcctcgtgcccaaaattagcccatagggttagagttgctattgcagaggtgttcatgctaggatactcattagatattgatttctcagcttactggtagctctttactgtacttaa

SEQ ID NO: 5900 - DNA, 401 bp, Lilium asiatic
  unsure (1)..(401): unsure at all n locations
  Clone ID: LIB3230-050-P1-K1-E12
ggaccttttcaatggacgaagtgggtgttgcaagctgaaggatgtacctgtctgaaacaggtttactttgatggtgggaactgggnnnncccttatggttttctgcttccatgaccgtcttctgttttgtctctgttcgtcgatatcctccctgcaaacaataaaatgattattgaaccatgcgagagggggatagtgtaaaatgattgagaatttttgctttttcagtctggaggagtcagccaaaggcaccattgtgtgatttaagagatcctcgtgcccaaaattagcccatagggttagagttgctattgcagaggtgttcatgctaggatactcattagatattgatttctcagcttactggtagctctttactgtacttaaaactaataaccttt

SEQ ID NO: 5901 - DNA, 407 bp, Lilium asiatic
  unsure (1)..(407): unsure at all n locations
  Clone ID: LIB3230-050-P1-K1-E2
gatgatattgtctttgggggatgggacatcagcaacatgaacctcgcagattccatggccagggctaaggttctagatattgatctacnnnnacagctaagaccttatatggagtccatggtccccctccccgggatctacgaccctgatttcattgctgcgaaccaggaatctcgtgccaacaatctgatcaaagggaccaagaaggagcaaatgcaacaagtcatgaaggacataagggaattcaaggagaagactaaggtcgataaggtggtggttctctggaccgcaaacaccgaaaggtatagtgatgtcatcgtcgggctcaatgacactatggagaatcttttcgcctcactagacaagaatgaatcagaaatatctccatcaactctctttgccatcgc

SEQ ID NO: 5902 - DNA, 412 bp, Lilium asiatic
  unsure (1)..(412): unsure at all n locations
  Clone ID: LIB3230-050-P1-K1-E3
cttaaattacttaaatataatttttgacattaatagaagttaatttttttgccatgtgataggtatttgaagtttcacaagcgctgtcnnnttgagaggaagcgattaggagcaggctgcagcgaggaaatgaacacactgtataggttttggtcatattttttgagagacatgtttaatcagaatatgtacaacgaatttcgcaagctagcactggatgatgcagctgctaagtataattatggactggagtgtcttttcagattttatagttatgggttggagaaagaattcagtgaaaatctatatgaagattttgaacagcttacacttcagttctaccttaaaggaaacctctatgggcttgagaaatactgggccttccatcattaccgtgaccacaacaagcctg

SEQ ID NO: 5903 - DNA, 411 bp, Lilium asiatic
  unsure (1)..(411): unsure at all n locations
  Clone ID: LIB3230-050-P1-K1-E9
acgggaagtacatgcaccacgcgatggtaaagggctaccaattagaaaaggtctgctttcgcccgtacgaagatgtcttgggcatgnnccattcaatggggatatcgagcattcttgtcccagggtctggtgagccgaatttcgatagttggcttgcgaatccgtacgagacgaagaagcagcggaacgagaaagaggtgcatgcgctgcttgacaagcttcagccagagaccatcatgctcgatccgactaggattggcacactgaagccaccgaggaagaaggaaaaggcgagtaaggaggagacggaggtggagaaggaggctgcgattgaggctgccaagaatgctaagatgaagaagaagaccaagggaaggagcaagccgagcagagtggcgaggaagaaagaag

SEQ ID NO: 5904 - DNA, 413 bp, Lilium asiatic
  unsure (1)..(413): unsure at all n locations
  Clone ID: LIB3230-050-P1-K1-F1
cggacgcgtgggcggttgaaagagatggggctcaccttcaccaagctgttcagccggttgttcgcgaagaaggagatgcggattctgannnncggtctcgatgcggctggtaagacgacgatcctgtataagctgaagctgggcgagatcgtcaccacgatccctaccatcggattcaatgtggagactgtcgagtacaagaacattagctttactgtttgggatgttgggggtcaggataagatcagacctctgtggaggcactacttccagaacacacagggactgatattcgtcgttgatagcaatgacagagatcgtgtggtcgaggcaagagatgagcttcacaggatgctaaatgaggatgaactgcgggatgctgtgttacttgtgtttgcaaacaaacaagatct

SEQ ID NO: 5905 - DNA, 414 bp, Lilium asiatic
  unsure (1)..(414): unsure at all n locations
  Clone ID: LIB3230-050-P1-K1-F10
cggacgcgtggggtcacgtaatataataattaaagctagttctttatataactacatagcaactatatagaggtaaagacatanngnnnncatcgacctcatatagtggttttgttgaatctcgaggtgggaaaaccatgactttgaaatgagcaagtggaggatgactattgagctcctctcaagggatctaatggccgacatgaacaagagaccactagagggagtccaaccacaaggcgaattaaggtggaaggacaagaatatcatcgaccgactacggttggagctagagtggtggatgagtcggtgaaacaatatggaagttttagctgagacccatcatgtcattcacaatacacatgtatgcaacttgttgggcctagtgccccaaagaatgaatgcctaggcaac

SEQ ID NO: 5906 - DNA, 362 bp, Lilium asiatic
  unsure (1)..(362): unsure at all n locations
  Clone ID: LIB3230-050-P1-K1-F3
cggacgcgtgggccagaacctcgccgtttggtgcatcccaatgatccatactattctgcccctccaactgatcaatatcatcaagttgancctcgagcatactatccagaaagtcaatcctaccctgaacgttatcaagagatggtttcaagggatcctccaccacaagctcctgcaagggactaccgctctgttagtgggccttactattctgaacatgctggtgctaatgctgcctatcaagcaccacgcggctttgagtatgatgctcccggccgctcatatgaagctccaagccgtgcttatccttgaaggtggccagagtgtcccaaggtggcaggtttgaatgtgccaagtgtgcc

SEQ ID NO: 5907 - DNA, 414 bp, Lilium asiatic
  unsure (1)..(414): unsure at all n locations
  Clone ID: LIB3230-050-P1-K1-F4
gtgcgctgcttgccacgttgcgctcaccgcttccatatcgagtgcattgacatgtggtttcactcgcactcgacgtgcccgctctgtagannntgtgtcgaggcagtgaagccggcggtcaagattctggtgattgataaagatcaggaggtatcaggatgcgggactgggccggatatcggaatcggctcatcctcgacgggtatatctgtatctagagttccagagttgccgtatatgagtggcgatgacagcaaatcaccggttggcccgatgggggcaattaggaggctgatgagcagggatttgagtctgcacggaggagttacaaccgaggaggccgtagtagatcttgagcgaggggagcggccggagagaacgccaggggagccgggactctgaggctgctagatg

SEQ ID NO: 5908 - DNA, 400 bp, Lilium asiatic
  unsure (1)..(400): unsure at all n locations
  Clone ID: LIB3230-050-P1-K1-F7
gagatcccatcctcctctcccggcggctccgacctccaaccctcatcagatacaatgaaggtcattgctgcctacctcctggcnnnncccgctggtaactctagcccgtcaagcaaggatatcaagcatattcttggatcagttggtgctgaggctgaagatgagcggattgagtttttgcttgctgaagttaaaggcaaggatataactgagttgattgcttctggaagagagaaatttgcatctgttccatctggtggtggtggtgtggctgtggcagtgtcggcaggtggtggtggtggtgcagctgcccctgcagcagctgctgctgagccgaagaaggaagagaaggtggaggagaaagaagaatctgatgatgatatgggttttagcttgtttg

SEQ ID NO: 5909 - DNA, 411 bp, Lilium asiatic
  unsure (1)..(411): unsure at all n locations
  Clone ID: LIB3230-050-P1-K1-G2
cggacgcgtgggtggcagtgcaaacctctctgttatactataccagattttttgtgcgttgtatgtcctagactacttcttccatgagnnnttgatgacctccacatgggacatcattgccgagagattgggcttcatgttggtcttcggagacctggttttcattcccttcacgtttagtattcagggatggtggctcttgacaaacaaagtggagctcacaacagcagctgctgttgtcaattgcttgattttcgtcattggttatatggtatttagaggagctaacaaacaaaagcatgttttcaagaagtatcctaaagctctgatttggggcaaacctcccaaggttattggaggaaagttgctcgcttcaggttactggggagtatcgaggcactgcaattacct

SEQ ID NO: 5910 - DNA, 85 bp, Lilium asiatic
  Clone ID: LIB3230-050-P1-K1-G3
gtcgaagaagtcagagcagacctacaagatctacatattcaaggtgttgaagcagggcggccccgacatcattatctccaacaag

SEQ ID NO: 5911 - DNA, 385 bp, Lilium asiatic
  unsure (1)..(385): unsure at all n locations
  Clone ID: LIB3230-050-P1-K1-G4
agacaaccatcattccatgaaattgattcaacaaaacccagatggttttccacannncacatcaactactagtaccaaatctaaacccaacaatactcgagaattcacaattttaaccaactagcaccattaaaccaagtctccatacaaattaaacgaccacaattcatcagatccaacacaaccaacaaccaacaacccataacagaaacaggacacaaccacagatacacctacacataactaagacacccaactagatccacccaccaaagttcactccttcgcagatttgttgatcagagacttatggatgtgcggaatcacaccacccccagcaatagtccccttgatcagcgtatccagctcctcatccccacggatc

SEQ ID NO: 5912 - DNA, 420 bp, Lilium asiatic
  unsure (1)..(420): unsure at all n locations
  Clone ID: LIB3230-050-P1-K1-G5
gcatgagagaaggggctacactgctgacaggtggtaagacctgtggtgagaaagggtactacatcgaaccgacgatttttactgatgtcnnggccatatgcagatagtgcaagatgagatatttggtcctgtgatgtctctaatgaaatttaagacaattgaggaagcaatagagaaggcaaatgcaacgaagtatgggctaggagcagggattgtaacaaaggacttgaatatagcgaaccgagtctcacgatcagttcgtgcaggcactgtctggatcaactgttactacgcctttgatccagatagcccctttggtgggtacaagatgagtggatttgggagggatcagggacttcatgcactggagaagtatctccaagttaagtcagtgataacccccatctataattctccatg

SEQ ID NO: 5913 - DNA, 422 bp, Lilium asiatic
  unsure (1)..(422): unsure at all n locations
  Clone ID: LIB3230-050-P1-K1-G6
accttccagcgcctagtaaacaagatctttcacggcataaacaaaatagttggatcctgtatcgatgatctacttattaagagtatntgnagnnaagatcacattcagaatctgaaagatgccttcaatcacctgcgagttttcagcctaaaacttaatccagaaaagtgtatattcgacgtatcatcagggaagttcctcggacacataattcataagaaaggcatcaacgttgatcctgctcagaccaaagcaatcctggggatacagagcccgaaatcagtgaaggacatctagatccttagcggcaagatagccaccctgcaccggtttatatccaagtcatcatataaagtccggcacttcacagctatgcttaagagaaccagagcttttgagtggaccaaagagtacgaggccgc

SEQ ID NO: 5914 - DNA, 408 bp, Lilium asiatic
  unsure (1)..(408): unsure at all n locations
  Clone ID: LIB3230-050-P1-K1-G7
tatcaatgataaagaccgctgcccgcagtgcaagggtgagaaggttgttcaggaaaagaaagtcttggaggtgcatgttgaaaagggnatgcagaatggccagaagataaccttccctggagaggctgatgaagcgcctgattgcgtcactggcgatattgtgtttgtcctccaacaaaaagatcaccctaagttcaagagaaagggtgatgatttgtttgttgaacacacactctcccttactgaagccctatgtggttttaggtttgtgttgacccatttggataatcggcagctgctaattaaatccgagcccggtgaagttgtcaagcctgatcaattcaaggcaataaatgatgagggtatgccaatgtatcaaaggccctttatgagggggaagctttacat

SEQ ID NO: 5915 - DNA, 61 bp, Lilium asiatic
  unsure (1)..(61): unsure at all n locations
  Clone ID: LIB3230-050-P1-K1-G8
aagtttacttacgcgtgggtgcgatgttatattttttttatagtgtnnnaactgttaattt

SEQ ID NO: 5916 - DNA, 419 bp, Lilium asiatic
  unsure (1)..(419): unsure at all n locations
  Clone ID: LIB3230-050-P1-K1-H10
ctctggctctcctgctaactttcaagtttatactgctcttttgaagccacatgagagaatcatggcacttgatcttcctcacggnggacaccgtatcacatggctaccagactgatacaaagaagatatctgctgtgtctattttctttgagacaatgccatataggttaaatgagagcactggatacatcgactatgatcagttagagaagagtgcaacactctttagaccaaaattgatcgttgctggagctagtgcatatgcacgcctctatgattatgcaagaattcgcaaggtgtgcgataagcagaaggctatccttttggcagacatggcacacattagtggattggttgcagccgcgtgttattccatcccctttcgaatatgcagatgtcgtaacaactacaactcacaa

SEQ ID NO: 5917 - DNA, 414 bp, Lilium asiatic
  unsure (1)..(414): unsure at all n locations
  Clone ID: LIB3230-050-P1-K1-H3
gcactcgcaaattcatgaccaaccgcctcctctcccgcaagcagtttgtcattgacgtgctgcaccccgggagggcgaacgtctcgaannnngagctcaaggggaagctggcctcgatctacgaggtcaaggatcagaactcgatctttgttttcaagttccgcactcacttcggaggcggaaagtcgactggattcggcctgatctacgacaacgttgagagcgccaagaaatatgagccaaagtatcggctcatcaggaatggactggccacaaaggttgagaagtcgaggaagcaaatgaaggaaagaaagaataggaccaagaaaatccgtggagtgaaaaagaccaaagctggagatgctgccaagggtgggaagaagaagtgaagggagctctttttactttcggttt

SEQ ID NO: 5918 - DNA, 408 bp, Lilium asiatic
  unsure (1)..(408): unsure at all n locations
  Clone ID: LIB3230-050-P1-K1-H8
gcattttcaaagtcatcgaagctggtaggtttgcttaaaatgcaggcagagtcggataaactttatggggcaatgtgtgcttctccnnctattgtcctggagcctcatggcttactgaagggtaagaaagcaactgcctatccagcaatgtgtgacaaacttttggatcaaagcgaatgcgagaacagggtggtggttgatgggaacttagtcacgagccgaggacctgggacgaccatggagtttgcgttgggcattgttgagaagctgttcggtcgtgagaccgcccttgaagtctcgaaaagcatggttttcacttgaggcccttaatatgctaaatcggtttagtgtcatgattttgtggcgtctgtatatgaagaatctgcttgtggttttggcactggtggg

SEQ ID NO: 5919 - DNA, 353 bp, Lilium asiatic
  unsure (1)..(353): unsure at all n locations
  Clone ID: LIB3230-050-P1-K1-H9
tcggcattatcaaagacatagaaactggtaggttagcttaaaatgcaggctgagtgggggaaactttatggggcaaagtgtgcttttcnnnttgttgcccaggagcctcatggcttactgaagggaaagaaagcaactgcctatccagctatgtttgacatacttatggatcaaagcgatatgcaataacagggaggtggttgatgggaacttaaattatcgagccgtggaccttgtacgaccatagagttcgcgttgtacataggcgaaaagctattacagaacttagattcctgcctaggaagtttcaataagtcaagaatttcactaggtggcccctttaatttgcctaa

SEQ ID NO: 5920 - DNA, 352 bp, Lilium asiatic
  Clone ID: LIB3230-054-P1-K1-A12
gaattataccaagcggcttaaagctctctatactcactggagagagcaccaaactgatttttggggttcctttgatgccattgcagttgccacaccccctccatcttaagatctgcgatatttaaaatccttcagctttgaacatatggctacttgggtatgaatttccagagacgatcatggttttcatgagcaagctgatacatttcttgtgtagtcaaaaagaaggcctctttactagaaacccttaaataatctgcgatagatgccttatgtgctgatgttgtgatgcatatcaaggctaataacgattaacggacccgttttgatagaggatattatttaggttcct

SEQ ID NO: 5921 - DNA, 232 bp, Lilium asiatic
  Clone ID: LIB3230-054-P1-K1-A2
cccacgcgtccgtggacgcttgggcggacgcgtgggctgactcgtgggcttttgttgagctggccttgagagaaagagaggatgatcctcccggtggttaatctgggcttgctggtacttaagacgctttgcaagactattggttcccgggtcaagaaagaggctgggaatcacccaaagttccgttagttgatcaaaatattttcgcagattaaccaatgtatcaccacac

SEQ ID NO: 5922 - DNA, 73 bp, Lilium asiatic
  Clone ID: LIB3230-054-P1-K1-A3
cgttttcccggacgcccctctccgcccacgcgtccagacctgctgcaccattatcagtgatcattctgctcct

SEQ ID NO: 5923 - DNA, 246 bp, Lilium asiatic
  Clone ID: LIB3230-054-P1-K1-B1
gcctccaaaaggtccggggtggataacacaccctggggcatgaagaggagtgatatggaatccaacaactcatgtcctttgaaattttacaacttattgatacactgtgctgcattttgttagccatctctagagatgagggtgatggattcaaaaattcaggaagcttttagaaccattgctggttgactaaagtatgacgtagcgcctatatttattggccgttgtggcgaaccatttcggcac

SEQ ID NO: 5924 - DNA, 205 bp, Lilium asiatic
  Clone ID: LIB3230-054-P1-K1-B3
tcgctttctgttctcttttcgtgtgcatgttgatgaaattatttgaacacaatccatgggattctttagctgtgatgggatttggagtgctcaatggaatttctattgggcttctaaacttaagtcaaagctttaactctgttggattttttcagatgtctgtaggtggcgttcattccatgttctgtattttttggagactctt

SEQ ID NO: 5925 - DNA, 407 bp, Lilium asiatic
  Clone ID: LIB3230-054-P1-K1-C1
gaaaaatatagccaaaatagagctcggaagatatgagatagatacttggtacttctcccctttcccgccagaatacagtgactctgtgaagctcttcttttgtgaattttgcctcaatttcttgaaacgcaaagaacaacttcagaggcatatgagaaaatgtcaacttaagcatcctccaggcgatgagatctatcgtagtggcactctttctatgtttgaggttgatggcaagaagaataaggtttatggacaaaatctttgctatttggcgaaattatttcttgatcacaagacactttactatgatgtcgatttgtttttgttctacattctttgtgaatgtgatgagagaggatgccacatggttggatatttctccaaggaaaaacattctgaagaggctt

SEQ ID NO: 5926 - DNA, 401 bp, Lilium asiatic
  Clone ID: LIB3230-054-P1-K1-C2
tgatcatctatcggatgtgctgcatgatagagaactacctagtgacaatccttctcgacttgaaacaccgatggttagcataaaaactattgaccatgttgacctattaagagagcaactaaagattctatctggggaagtagcacttcattcaagtgtcttaaagcggctttcagacgaggcaaaaaatagcccaaagaaggaacagattcgggtggaaatgagaaaagtgaacattgagattaaagccaagaagcagcagatagcttctttagaaatgcagatggctgattcactttcagctgcacagaacaaagttaagaagttcggactttcaccaccttatgctgaactactaaaacagctgaatgagaaatcttttgagctcgaggtgaaaactg

SEQ ID NO: 5927 - DNA, 371 bp, Lilium asiatic
  Clone ID: LIB3230-054-P1-K1-C4
tccgcccacgcgtccgcccacgcgtccgcggtttggctgcgccctaattctaagttttccgaatttcgattcagtctgtgctcagaggcttgttggtaatttattgcctgggaaggatttaaacaaagcaaagggctactacatacttcagaacatgcaaattagtgtttgataatttaccagaacagattcgctgattcagcagtcatcttccaagtgatgcaaggtgcttcaattagttccatggcagcctcagcaaatggggggacatgtggtgtggttgcgttgttgagcagtgatgtcagactttattaatggatcagcagaagctcatcgattgaacgacggcgcttttggagtccgcgtgtgct

SEQ ID NO: 5928 - DNA, 416 bp, Lilium asiatic
  Clone ID: LIB3230-054-P1-K1-C8
ccgtaccaggcccacgattagcttcgggtgcatgcggagaaagagatccttcatattgtcgacgagcggaactctaaggggactgaagttagaacaactgagctgatgactccctgagcgttcattttcttgtacgagaaccatctattcttaacattccgaaaccgcaccgaggcggtatggaattttcgaggagagctagtaaccttcgtcgaagaccacttgctctggcaccctgattgtaatacaaacatcattcatattacaagcgaccaggacctgataatatcgtactgcaaggcaggcgtagaaagcgaaaattgactgtggagtctctgctgcgggtcaatcaatatgagcaatatcctcactgggaagtgcattggcaagatatgcttaactgaccaagctctttt

SEQ ID NO: 5929 - DNA, 253 bp, Lilium asiatic
  Clone ID: LIB3230-054-P1-K1-E11
gaatattgatactttctacataactgactttttctgcaagcgtgcggaactcgggtacaactatggcgttatacttattccggaaggcctaatagatattattgctggggggcaacaacttatggcggaactaaaatgagatcctagctcatggggctgttgtcgagggaggcgtgtggaattataaactgaaggatcaattttatgatatgtttgagcgggtaccacaagcatattcagggggggctggtat

SEQ ID NO: 5930 - DNA, 399 bp, Lilium asiatic
  Clone ID: LIB3230-054-P1-K1-F1
cggacgcgtgggcggatgactgggattccatatgcatcaacaattggatcaagcatgtatgccatgttatgtacttgtccagatgtttcgtatgacgagcaggtaccagtcagatccaggtgatagtcactagactgctgtcaagaacatccttaagtacttaaggactaaggattcgttcttagtatatggagccaaggaagagcttgttgtgaagggttacattgccgctagcttccaatctgataataatgactctagttcgtaatcgagatttgtgctttgcttaaatggtggagttgttagttggaagagtttgaaacaagaaacagtagccgattctaccacaaagtatgagtatattgctgcctccaatgcaacaaaggagaccgtttggat

SEQ ID NO: 5931 - DNA, 117 bp, Lilium asiatic
  Clone ID: LIB3230-054-P1-K1-F3
gtcaggcgcgggtgggggacagaaattccctaaggataagaagccgaatgctgcgtagatggtatgcgaggtcatttgccagaatgtttagaagacttagaataggtctttcaaatc

SEQ ID NO: 5932 - DNA, 396 bp, Lilium asiatic
  Clone ID: LIB3230-054-P1-K1-G1
ggcagcttgaagagcagtggctatttcaatggaaatagctttaataacggggagatcaagaattacttcaataaggcgattgctaagccggttggaaatgatgcgaggaagaacgtctacgtcaacatcaataatattgaaggaaaggggatcgggaagaagaaaaacacgatcagcaacaatgatggcggtgcggcggtttacaagaggttcaagacgctgccgccctcataggcgctgccgaggagcgaggctgtgggtgggtatatctttgtctgcaacaatgataccatgcatgagaatctcaagaggcagctctttgggctgccacctagatacagggactcggtccgagcaattacacctggggctgccctctttctatacaattacttc

SEQ ID NO: 5933 - DNA, 481 bp, Lilium asiatic
  unsure (1)..(481): unsure at all n locations
  Clone ID: LIB3230-054-P1-K1-G10
aaaaaaaaaaacaaaaaaanaatattaaaaaaaaatttataaaaatattattactaataaatttattaaaatgtttttatataaatttttaaaaaatattatttataaaattattaaaaaattattaaaaaaaaaattataaaaatttttaataaaaaattttaaaaaatattttattaaaatatttttaataatttttattaaataattttattaaatatatatttataaaaaaattataaaaaaaatatatcaaattaaaattttaaataatatttttaaaaaaatttttaaataatatatttataaaaaatttttataatataaatatattaaaaaaatttataaacaaattttattaataaaatattttaaaaaatttatttaataaatttttataaaaaaattttttaataaaattttttaataaattttttaaaaaaaatttttataaaattttttataaataatttttttaaaa

SEQ ID NO: 5934 - DNA, 305 bp, Lilium asiatic
  Clone ID: LIB3230-054-P1-K1-G12
gatgaatgatagaggtattggacgcgcaattcgcctagatgttcaggcatttaaggatagggatgctgcttgtgcttcatatagctgggctttattatatctaaagggttaccaatctttgcaatcatatcgcgtggctcatgttttatggaaccaaggacgttaagtcctagctgtggctttgcaaagtataatcagtgatggttttgctgtggatatacattcaagctgcaaaaatacggggaaggaatattattagaacatggaacaggcttggttattggtgaaactgctggttgaggaaa

SEQ ID NO: 5935 - DNA, 53 bp, Lilium asiatic
  Clone ID: LIB3230-054-P1-K1-G2
acgggcttcaagaatagcattggctaattcattggaaatagctttcaataacg

SEQ ID NO: 5936 - DNA, 169 bp, Lilium asiatic
  unsure (1)..(169): unsure at all n locations
  Clone ID: LIB3230-054-P1-K1-G4
aaaacagnccgtaaacccgttcaacccacgcgtccgagctaaaataatccaatgtttgctgacactaaacagcgtggagcttacaactggttgtaggatgtttgaagactgttatcccatctatcatattactgctaagggtaaactgaagaatttatctacatgctat

SEQ ID NO: 5937 - DNA, 284 bp, Lilium asiatic
  Clone ID: LIB3230-054-P1-K1-G9
aaaaaaaaaggagaaaaaaaaagggagaaaaaaaggaaaaagaaaagaaagaggaaaaaaaaaaaaaagagaaaagaaagggaaaaaaaaaaaaaagaaaaaagagaaagaaaaaaagaagaaaaagaaaaaaaaaaaaagagaaaagagagaaagaaaaaaaaagagaaaaaaagaaaaaaaaaaaaggaaaagaaaagaaaaaaaaaaaaagaaagaggaaaaaaaaaagaagagaaaaaaggagaaaaaaaaaaagaggaaaaaagaggagaaaaaaaaaa

SEQ ID NO: 5938 - DNA, 361 bp, Lilium asiatic
  Clone ID: LIB3230-054-P1-K1-H1
cgatggtctgttaaggcatgttgctgaagacgtattacagttggcaaaggaaggcttggaaagaagagggtacaaagaagttggatttttgaatgaagtgactgaggtggttaaaacaggggtgacgccggctgaaaagcttttgaagttgtaccatgagaagtggggatgcagtgttgatccagttttcgaggaattgttgtattagaggttctgtgtgattgccgatggagctataaattacttattgaataagtatgtctgaattaccgttagggacctgttcacatgtgcagtcctcctagataagagtatctaacgtgtgtgtattttatgcaaccccttctcacaacaaggaatg

SEQ ID NO: 5939 - DNA, 378 bp, Lilium asiatic
  Clone ID: LIB3230-054-P1-K1-H2
cgatggtctgttaaggcatgttgctgaagacgtattacagttggcaaaggaaggcttggaaagaagagggtacaaagaagttggatttttgaatgaagtgactgaggtggttaaaacaggggtgacgccggctgaaaagcttttgaagttgtaccatgagaagtggggatgcagtgttgatccagttttcgaggaattgttgtattagatgttctgtgtgattgccgatggagctataaattacttattgaataagtatgtctgaattaccgttagggacctgttcacatgtgcagtcctcctaaataatagtatttaacgtgtgtgtattttatgcatccccttcttacacaagggaatgtagtaatttttatcaaa

SEQ ID NO: 5940 - DNA, 114 bp, Lilium asiatic
  Clone ID: LIB3230-054-P1-K1-H8
ccacgcgtctggtggcatcacctagccggcgatccgccgtctcgctcttcgcggtggcgtgaagaggattattgtcctcatctacgaggatacccggggggtgctgaaaaactt

SEQ ID NO: 5941 - DNA, 373 bp, Lilium asiatic
  Clone ID: LIB3230-056-P1-K1-A6
gaatgatgttatctcggagtgttctgtactggggttacctgacaaagattatggagaagtagtgtgtgcaataattgttcctcaagatggtgcaaaaagaaaagcagaacaggagctgaagcctgcgttaagcttggaagaattgcagaattggtccaaggaaaaactagccccatataagattccgacgatgttgtacttgtgggattctattcctcgaaatgcaatgggaaaggttaacaaaaagagctgaaaaggttactgttagaatgatcagtcttttgggccatcatcacttctggtggtttttaaaatggcatatttctgaggttattaagttaataagtgtaggtggccaaatatttctcttggc

SEQ ID NO: 5942 - DNA, 427 bp, Lilium asiatic
  Clone ID: LIB3230-056-P1-K1-A7
ggcagctaacctcaagggcagcacgatcgcagggaggctgggaaagcaggttgtggatcggatcttcatcagcccaggcaggcaggggacgcaggttgtggatccgatcttcatcggccgaggtccggtgattgcttctcgaaggggatctcactcgtcctcttacgacaaggaggtggacgaccacgttgttccagcggtggtgcctgacattccagtatccggcagcaaccaatactgggcccccaatcccataccagtctttggtccctccactgagaagggagtcggctccggcagtggtccgatcccggatggttcatcggtgctggagcagaaagtgtggtttcgcccgcttgaggacgtggagaagcctcacagccctacccagtaagcaagattagggcaaacctcataataataagag

SEQ ID NO: 5943 - DNA, 410 bp, Lilium asiatic
  Clone ID: LIB3230-056-P1-K1-A9
tagccagtgatgagaaggttgcagagacgtaccgtgagaagacatggaagccgaagtatgatgctgagaaagaaaagctgaaggccgaagaagcatctagcagtctttctgatggactttcagtcttccagaagaaggtgtttgatgttctttacaaaatagcggactttcctttcttggcggcatataagatcaagatcattgatgtgattgagaagggagaaacacagcctaacttgaccattgggtcctggtttctattgtggggggaatcgtgacagcaatattcaggattggctttcgcgggacaaggaaacctgtggcggctgcacctgttgtggaaactgaaggtgctagagcttctgaaactgatgagccagaaagccgtggtgcacacgagggggagaaca

SEQ ID NO: 5944 - DNA, 409 bp, Lilium asiatic
  Clone ID: LIB3230-056-P1-K1-B10
tccagcctctctcatggagtcttcgaatgagcgttgccctaggagctgcaaaggggctggcctttctgcacagtcctcaagtgaaagttatataccgtgattttaaggcctccaacatccttctggactctaactacaatgcgaaactttctgattttgggctagcaaaagatggtcccactggcgacaaaagccatgtctctactagagtgatggggactcacggatatgcagctcctgataccttgctacaggccatttgactgccaagagcgacgtttacagcttcggagttgtactgctagaaatgatgtctggccgtcgagcagttgacaagaaccgtccctcaggtgaacacaatctggtggactgggcaaaaccttacctaaccagcaagcgcaagctcttc

SEQ ID NO: 5945 - DNA, 329 bp, Lilium asiatic
  Clone ID: LIB3230-056-P1-K1-B4
tcgcccacgcgttcgtcttgagacttttagacgatactccattcaagaagatgacattgttggtgttaaggttcctggcagctttgaaattccagttgttgcacaaaagcttgtgaagtcgggagacttttatgcttgtttatgtattggagcagtgataagaggtgatactacccactatgatgctgttgctaattcaccagcctctggagtgctgttcggcggggcttagttaaggtgttccttgcaatttggtgttctgacatgcgatgacattgaccaggcgttgaattcgtgctgggggggaaagctggaaaatatggagctga

SEQ ID NO: 5946 - DNA, 382 bp, Lilium asiatic
  Clone ID: LIB3230-056-P1-K1-B6
tgcatgcaatccaagccgtcaactccgagatcaacgctgccgagcttccttactctatctctccttgatttctttttggattaaatctggagcttacaaatataactctccgtgcaggaatggtggagattgctaacacgcgcgagccagagctatcaagggaggagttgatcatgcatgcacgaaggcggagatggagggctctgatgatgtgaaggaacgaggagcagaggatcaagcaaagagaagcacatgcagacggaccggatcgagaaccaggagatcaagcaccgatgattgatggctctgatgaagagaagttctgatcacacaggcgaatagggaggccagtgcaagaaagactctaaaagcttgggtgaga

SEQ ID NO: 5947 - DNA, 421 bp, Lilium asiatic
  Clone ID: LIB3230-056-P1-K1-B9
tgaagtatagtgagtctagcttggagttgagatcaggagtcagtgaggttctgtaaagatagtaagcagtggctatgcagagtgtttagagttcaattggtacctgctatcttttggttcagcatgtacatgttgaggatgacggtgtcgtgcatgtgctccatcctcttcagtttgctccaatgatcatggaagccagtaccagcaaggatctccgccctttctgcaattgtggagcccgcatgatgtaggaagagaatacagttgaagaacttccatttaatcgaggtcatattcttaagagcttctttttggtttctgcaacaatgttcgaaccaaaattctctgcatatcgtgttgctttcaccaaaagtgctaccttagcagtctttgttgatgatcttttttattatccagcttc

SEQ ID NO: 5948 - DNA, 189 bp, Lilium asiatic
  Clone ID: LIB3230-056-P1-K1-C2
tgaagtatagtgagtctagcttggagttgaaatcaagagtcagtgaggttctgtggagagagaaagcagtggctatgcatagtgtttagagtttatttggtacctgctatcttttggttaagcatgtacatgttgaggatgacggtgatgtgcatggtgcttcatactctttagttggctacaaagatc

SEQ ID NO: 5949 - DNA, 419 bp, Lilium asiatic
  unsure (1)..(419): unsure at all n locations
  Clone ID: LIB3230-056-P1-K1-C3
caaaaaccttgaagtttactatgatgcatgggacaagtttatcgacacatggatcatcatgaaaatcagagaccctgattgtgtataccaatggcgactgcaggccgaggttgccatgagggccgatgggaaacctggcatgtctgatgaggaggttttggattttgtttctcgttatttgccagcttacaaggcctatcttccaaagctctattcagaagggccgaagagcttcgacaaggatcgtttcttgtcatcgagattgacgatgagaggaaccctgttggctaaaaacaattttgatcccaagtcatattgttgtttcttactgtggcttgtctactttctatttgtaagataccgagaaagtccatcagagaaattcatatattagtatatttntgcaagttagaactgtt

SEQ ID NO: 5950 - DNA, 273 bp, Lilium asiatic
  Clone ID: LIB3230-056-P1-K1-C4
cgcactcattgtgagactgtgttggggatttcgtcaaacatcttacgggcatcatgagattgaccgagttttaggtatgtgctaactagagctgatgccgtgtgtatgttggcttggaatccggatttgaacatattgacttgagctcgtctgcctagtgtagtgtaagggacatactgccctctttggaggtctaagaataaaaggaaagatcccacaacatggctgttggaaaaacgataaattcaaaggtgttctaaaaccacaagaatc

SEQ ID NO: 5951 - DNA, 391 bp, Lilium asiatic
  Clone ID: LIB3230-056-P1-K1-D1
cgcaagtaccagaagagcaccgagctgctcatccgcaagctccccttccagcgtctcgttcgggagatcgcccaggacttcaagaccgacctccgcttccagagctccgctgtttctgccctccaggaggcctctgaggcgtatctggttggtctctttgaggacactaacctctgcgccatccacgccaagcgtgttaccatcatgccaaaggacatccagcttgcccgccggatccgtggggagaggcttgatctgtttgaacaaatgccccagagagagtagatttgttttggcttttagttctgtaggttggatgtcttattctgtactctgtagcaaacttttgtttccggaatttatttggatgaatgttatgggtgctctcaaa

SEQ ID NO: 5952 - DNA, 400 bp, Lilium asiatic
  Clone ID: LIB3230-056-P1-K1-D5
cggcgatcttcagccggagcatccgagcggctatcttcagatcttcggcaccggagcatccgagaaccatgggtaacttcagattccatcagtaccaggttgtcggacgtgccctcccgaccccgacggatgagcacccgaagatcttccggatgaagctgtgggcgacgaatgaagtcagggcaaagtccaagttctggtacttcctgcgtaaattgaagaaggtgaagaagagcaacgggcagttcttgccattaatgagatttttgagaagtatccgaccaagatcaataactatggcatttggtttccggtaccagagcaggactggctaccacatcatgtacaaggagtacagtgacactactttgaacggggctgtttagcagatgtactctga

SEQ ID NO: 5953 - DNA, 385 bp, Lilium asiatic
  Clone ID: LIB3230-056-P1-K1-D6
ggccgccactgtcgtcgcgccgaagtatacttcagtcaagcctttgggtgatagagtgcttgtcaagatcaagtcatctgaggagaaaacaactggtggtattttgcttccgacaactgcccagacaaaacctcaggctggggaagtagtcgcaattggagagggaaggactatcggcaagaacaaagtagatatcagtgttcagtctggagcacaggtagtctactccaaatatgctgggacgaattggaattcaattggaactaaccatttattgctgaaggaggatgatattgtgggaattcttcggactgatgatgtcaatgatctcaagccttttaacgatcgagttctgataaaggttgcagaagctgaggagaagact

SEQ ID NO: 5954 - DNA, 115 bp, Lilium asiatic
  Clone ID: LIB3230-056-P1-K1-E2
ggttactcatactcaggtcggtgtgcatcatatgcctttgctaacatatatccaggggggatttcacggtgtgtttcttatttgggaccgtcttcaccaattatatacacttcct

SEQ ID NO: 5955 - DNA, 334 bp, Lilium asiatic
  Clone ID: LIB3230-056-P1-K1-E3
cagagaccgtgatgtttacttatgtatgccatggtacaggagtatcgacagcacggatgagtagggaaaataacagaccctgcatcgggtataccaacggagactcgcggccgaggatgccaagagggccgatgggaaacctgccatgtatcatgaggaggcctactatttaggttctcgtgatgtggcagctaacaagggctatctttcaaaggtctatgcagaagggccgcatagctacgacaaggatcgctttttgtcatctaaaatgacgatgagaggaaccctgttggctaaaaacaattttgattccactgcacattgctgtctcata

SEQ ID NO: 5956 - DNA, 415 bp, Lilium asiatic
  Clone ID: LIB3230-056-P1-K1-E7
cacgcgtccgcccacgcgtccgggagcatggctaccgccttggttcgcaactcatataggtcattgtcaggatcttgtagcaactcactggaatgatcatggaaaacctgcattggatatcacccttcaaaaggcatatgaaaaatattctcaggcagaaaaatgggttgaaccccatgcgactacagtaaaaattaaatggattcctgctgttaaggaacaagtggtgacctttataagatatttggaacccattttcagatggtatctacgaaaaccatcgagttttacgaggcatctaagagtgccactgcaccacatattacaaaagtacaagaactgacagtttcttactttcaggaagcaaagaagttctcgaagccctatgtttgacaagttgctattgtaccaaacc

SEQ ID NO: 5957 - DNA, 101 bp, Lilium asiatic
  Clone ID: LIB3230-056-P1-K1-E8
agaccggaccgaattcgggtcgaccaccgtcggatgagaccacttgaaggcagtgtctgaggccaacgaaggcaggggggggcataaaagagagtggatat

SEQ ID NO: 5958 - DNA, 328 bp, Lilium asiatic
  Clone ID: LIB3230-056-P1-K1-F1
ctagctggttgcccggaatttgtcgccggcgctgtcgggtcgccgtgatgccgcgcctcaatgtgaccccgtgttcccacacgaccatcctagcgcgaggacacgtgtcatctgaaaagcaagttggtacctggaatctcaagtgccaggtcaagaacaggtaccacaggatgaggcacatggaggatgctgcgatgtgttcatgagaggtctaggccgtcgtctcccagtcactttgggttgctggaccgttgtctccttataatgtaattatttatttattttgtatagaactcctgctatgaagtaaagatgtgacattcgatcc

SEQ ID NO: 5959 - DNA, 394 bp, Lilium asiatic
  Clone ID: LIB3230-056-P1-K1-F10
cttgaagggcgtgaaagattcgaagaagaaagtttgctagaaataaataaagcccggtcgcttcattcttctggaacagagaatgatatatcatatgattgtggcgaggtgactgagtattcaatcagtccacgtctgaaagcattctctgattggcttttgaaagttatggcatcgggggatctggaagctatttttccagctgctactcgtgaatatgcaccgaaagttgaggagttgggaataatgctgccatccaggcaacatatagacggagaaatgaactgtcattgctctccagtgtatcaagttatttcttggagagggttggtgatatatctagagctgattatgatcccttctgatactgacatcctctatggtaatgggattt

SEQ ID NO: 5960 - DNA, 369 bp, Lilium asiatic
  Clone ID: LIB3230-056-P1-K1-F12
ggtagaaaatcactatccagaacctataaaacgcaacaaaacataaaagtgcatccagtatttggataggagacaaaactatacatgtgaaatagggtaatccgttccattactatatgtgtgtaccagaaaatgaattagatacatctgtctgagaaacgagtcaatactcgcaccatattcatcttggagggcacactacagcgcaattgatacatttgtctgacaagtaagtcaatactcagcaccaaattaatctttggcgggcacagctacagctcactataattgcgccacactgcacggaactcctcacggaacgtgttcagacgagctttaaggttcggtgtcctaaagcttgcatggatt

SEQ ID NO: 5961 - DNA, 323 bp, Lilium asiatic
  Clone ID: LIB3230-056-P1-K1-F2
cggccggatcccggtcgcccagcttcgcaacaccaacatagtctaatatggcagccagcggtggctataatggggagaaccctatacaatcctgaaaattgttcctgcttgcttgcaaagaatgactttatgtatgtcgctcagcggaaaatattttgtcaacagcaccttagaggtaacactttagccctgctccgtgacatttttgattcatctgagacaattatagcggatggaatggacactcacattatatttcaatgtccaggaatgtctaaaatgggacaaaggtcactcagcaggaaactggtcttacttttttg

SEQ ID NO: 5962 - DNA, 212 bp, Lilium asiatic
  Clone ID: LIB3230-056-P1-K1-F4
cggacgcgtgggcggtgatcgacggctcgaggggggcgaagcacgccatgatgtgggcgctcactcacgtcgccaacagaggcgacctcctaacacttctgcacgtcgtctctccggccgatcgtctgatgcactgcggcacgccggatctttgccgactcgctttgagcactatgcaaagcccgcaaaccataggttgaggtggtagcact

SEQ ID NO: 5963 - DNA, 407 bp, Lilium asiatic
  Clone ID: LIB3230-056-P1-K1-F5
cggaccggatcgagaaccaggagatcaagcaccgatgattgatggctctgatgaagtggaagttcttgatcagacggcgaagagggaggccgtgcatgaagactctagaagcttgtgtgagaggagatcaccattggttgtgcatgcatggtgctcggagaagaagggatgccaggcagaagacgagatctataaagccctaaggacgagcgatgaagctccccaagtctcagacgaagaagttcccatttctttgagcctcctttatccaggaactttgcttagtgacagagtcgagttcggggaagaaggagtaggtagtagtcgtattctgttagatgatatgtattttttttttatcctgttgagttgtaggaagttagatttttcttcttctttcgggtttt

SEQ ID NO: 5964 - DNA, 387 bp, Lilium asiatic
  Clone ID: LIB3230-056-P1-K1-F8
agcaagctcttgggtagttcctaacgaagacgaggcacgtgaaatggcgggttcagcaagggagtgttccaggagactccagaaactatcagcagaagacagaaggaagattttactggacattgctgatgctctagaggcgaaccaggaattaatcaaaatcgagaacgatgctgatgttgctgctgcactacaatctggctacgaaaaatcattaatttctcgattgactatgaagccagaaagatctctagcctttcaaaatcaattcgtgtacttgcagacatggaagacccaataggccgtattctgaaaagaacagaactttcaaatgggttagttttagagaagacatcatgctcccttggtgttctcttgattgttttt

SEQ ID NO: 5965 - DNA, 408 bp, Lilium asiatic
  Clone ID: LIB3230-056-P1-K1-F9
cgatcatagagtttggggcagtgccgcaactgttgagattgctgcggacgggagagaagacacagttacctgcattgactctgctatgtcacctgacattgcacgcaccaaacagcgaggctctagggcgatacaaggtgttggggactctagagtcggtggcacgaactgcgattgctcaccatcctgatttaagggagcttctccctgatgccatgtaccaccttgagctttaccgtggtgaggaaattcacataaccaccaggtgtatgcgcatacttctcttccgatttagcagggataaaatggcttcttgcaaatgatgggtctgaatatggaagcaagtctgtgatgtacattttgatctgatcattctattggctcaaatatatgctggttggtgcatca

SEQ ID NO: 5966 - DNA, 365 bp, Lilium asiatic
  Clone ID: LIB3230-056-P1-K1-G3
ttttggaatggcacctacctttgaaccggagacagagattgagctctgacccatacagcaaaatatgcgtggatatccgaaagagcttggatatggacatttcgagtgcgccttgaaaccaacaagacaaagagaccctctcaccataaacatattcgagtgttgtaagaatattctgcacatctactttaactccatctacattctgagatacaagatagctgtgctggtcatcataatactcaatactttgtttgggtctatcatgccaacaccatattttaccatggcatccatggttaaatctctggaatttgcaagggttcctggagaatgagctgggtatattatttttgagttatact

SEQ ID NO: 5967 - DNA, 350 bp, Lilium asiatic
  Clone ID: LIB3230-056-P1-K1-G4
gcggacgcgacgcgtgagcgcgaggggctccgcgacaatatccagggcatcaccaagccggccatccgccgcctcgcccgccgcggcggtgtgaagcgcatcagcggcctcatctatgaggagacccgcggggtgctgaagatcttcttggagaacgtcatccgtgacgccgtcacctacaccgagcacgcccgccggaagacggtcacggccatggacgtcgtctactcactgaagcgccagggcgcaccctctatggcttcggcggctaatctatctatctatcttaagggtccgcggatgaagctggaaatcaattcggtctccttttatcttaagagtgttaagtt

SEQ ID NO: 5968 - DNA, 295 bp, Lilium asiatic
  Clone ID: LIB3230-056-P1-K1-G8
aaaaaaaaaaataaaatagacaacaaaaaataaaaaaacaaaaagaaatagaaaaaaagacgaacaaaacaaaagaagagaaaaaaaaaaaaacaaaaaaataaaaaaaaaaaaaaaaaacaaaaacacaaaaaaaaaataaaaaagaaaaaaaaaataataaaaaaaaaaaaaaaaaaaaaaaaaaaaaaaaaaaaaaaaaataagaaaaaaaaaaaaaaaaaagacacaaaaaaaaaaaagagaaaaaaaaaaacgaaaaaaagaaaagactatacagaaaaagttaaagaaa

SEQ ID NO: 5969 - DNA, 297 bp, Lilium asiatic
  Clone ID: LIB3230-056-P1-K1-H12
tcggccagattgtgcacaagatcatcggtgcccatagggaagaaattgagaagaagattctacagtacgcctaagtgatgatcattctgtgtttatgcatacagaaatttgatcatgaaatctattgttgtgtgtaataataagtatccccgtgatctggtaggggatttggcactcgtgtatttctttctatattgttggatataaaatcaatgttagactaatattttgcttgtttgctgaaattgacttttatgtccgttcgctttctgaaatcatgtttttttttggggttgc

SEQ ID NO: 5970 - DNA, 375 bp, Lilium asiatic
  Clone ID: LIB3230-056-P1-K1-H3
aaggggatgttgtatgtgctaacggatgcaaaaatctgaggaagctggagataagggacagtccatttggcaattccgctcttctagatgacatggggaagtatgaaacaatgcgatccctttggatgtcatcatgtgatattactcttgggggttgcaaggtgttggcagcgaagatgccgagtcttaatgtggaggtcataaacgagaggaggaatgcaccgagatggaggaaaacacaagcgatcttcacaaggtagagaagatgtatgtttatcggacggtggctggaccacgggatgatgcaccggatttcgtatggacactatagagcaatggtgctggaccatgggatgatgcaccggatttcatatg

SEQ ID NO: 5971 - DNA, 415 bp, Lilium asiatic
  Clone ID: LIB3230-056-P1-K1-H7
cgaccggctccatcaacccactctcacaactccctccctcgccacagatcgagatccagcttcttcttcatctccggcaccggcgcaatggaatcttgtccttctataaaaaacattcttctccttgattctgaagggaagagagtagctgtcaagtactatacagatgattggccaacactagcagctaagttagcatttgagaaatctgtatttaccaaaactcagaagaccaatgctcgtctgaagcggagataacaatgtttgatggctacactgtagtctacaagttcatccaggacctgcatttttttgttactggaggggatgacgagaacgagctcattctagcaacagttcttcagggtttttttgatgcagttggccttcttctgaggagcaatgtcgacaagag

SEQ ID NO: 5972 - DNA, 281 bp, Lilium asiatic
  Clone ID: LIB3230-057-P1-K1-A1
tggacgcgtgggcaaagttattcaacaggggcaacattcattccagggttcttttgacggatttttggaatggctttatattaactctgacttggatggcgcacagaaaaagctccgcgagtgtgaacttgtgatactgaaagaaactttttttgtggaaagactctgaagataatattacaggcccctttaggggtatgagtttttagaacacgcggggttttttttttgtgaatattagtggggaatatatgtgtattgttatatggatgctcgttgtg

SEQ ID NO: 5973 - DNA, 348 bp, Lilium asiatic
  Clone ID: LIB3230-057-P1-K1-A10
gtcgtcgccgccgccgccgccgccgcatcggacgatcagcgatccatcgcgaaggggtgactaccgatgaggtgaatccgaaggcgtacccctaggcggactctcagctgacaatcacaagcatggagcgcatccaggaggcggacaattacaagcagctgaagaaaggagcaaatgaagcaacgaaaactctgaacagggggatctgggaggttgaggggaaggggggtgatactgagccgcttggaacacttcgccatggccctctactggccgaggagaagaaagcgccgcaagggggcgggccatcaaaacaagcgcgtgggcgggcctgggggagagacaagg

SEQ ID NO: 5974 - DNA, 386 bp, Lilium asiatic
  Clone ID: LIB3230-057-P1-K1-B10
gccagggagaggcagaagaagaggctcacagttgagagtacctcaaagatctccactactaccaacaacaatcatggtactcatgcactatcacataacttgatacttcaacaattatttttctcattgcaaaataattttcccaaattgatttttattctttgcaaattttggtggtgattttcatttatttttcatatgattaatcatcattgttttctgtgaagttcctgggatttctcctgtcccctgttccacaagattgtatggttctctcgggcacatgggaaggacagggttatgtgcgtccttgttcatggaaaggggctttgcaataaggaatattttcttgccattatttgggtttcattattaagctaattttt

SEQ ID NO: 5975 - DNA, 386 bp, Lilium asiatic
  Clone ID: LIB3230-057-P1-K1-B11
ggccgcccttttcaattttacaatcaaaaagctgtaattcaaattcaccacctacgggaccttacaacacgccctttaagctttctttggcgtattggtggctttcttgggagacttgggagtcttcttgggagattttgttgaagcagaatcacccttctcaagagtcttcttggggagcaggaccggtttgatgttggggatgacaccgtcatgggagatggagactccagggagcatcttgcccagtttctggtcgtttctgacagcaaggtagatctgcctcgggatgacacgagactgtttgttgtacttggcagcattggctgtcagctccaggacctgtcaatacccataattcaaatttgattataaaaacaattggt

SEQ ID NO: 5976 - DNA, 376 bp, Lilium asiatic
  Clone ID: LIB3230-057-P1-K1-B12
gttctagatcaaagcatccggatcatccaggctatgatagatatatctgccaatgggggatggctttcaagtacattgacatgcatgcatcttctacaaatggtcatgcagggattatggtttgaaagagattcatctttatggatgttaccatgtatgaacagcgatcttctaagtcatctcaacagaatgggattctcatctgtgcaagagctattggaacttccacatagggaattacagatgttgctccaacgatgtccttcttctgaattatataaggatcttcagcggttaccacgtgttcaagtaaaactggagctttagatgagagatgcaggagcatccggatcacgttctaaaagtcaaattagag

SEQ ID NO: 5977 - DNA, 349 bp, Lilium asiatic
  Clone ID: LIB3230-057-P1-K1-B7
gaaaacctccgggcggcccacgcgtacgcccacgcgtccgcccacgcgtccgggacgaggagagacttcagtacattcattcgggcatgtgagaagtatggtcgcactgacatcaaaaggatagcttctgaattggaaggaaaaactgaagaggaggttgagagatatgccaaagtcttcaaagaacgatacaaggaattaaatgattatgatcgtataatcaagaatattgaaaggggagaggcaaggatttctaggaaagatgagataatgaaagcaattgggaagaaggtgggtcgctacaagaatccttggctagaactggaaattcacgatgggcagaacaaag

SEQ ID NO: 5978 - DNA, 383 bp, Lilium asiatic
  Clone ID: LIB3230-057-P1-K1-B9
cggacgcgtgggcgcgaactcgctcctcgcccctccagcaggaaagggaaaacgggcaagagggtgcactttgtgaagaatttgatcagggaggtggctggatttgcgccgtatgagaagaggatcactgagctgcttaaggttggcaaggacaagctgtcgctcaagggggcaaagagaaagctgggtactcacaagagggcttagaagaagagagaggaggtgggtaatgtcctcaagaagacgaggtctgctggagtgtccgattagaagaaattatgggggtgagactacgttgggggctggtttcatattttggggtaggattgtgggttctctcgaacttggaaaccttacctggaggactaggttaatttttggtg

SEQ ID NO: 5979 - DNA, 322 bp, Lilium asiatic
  Clone ID: LIB3230-057-P1-K1-C1
cagggtttctcaacggtcgggaagaaaaggccacggatggagtcattgcctgaagctgtgagaaagatgagagcagttggagaagagcgaaggtgtcgactggttgcagggaaaatacccaaactactggaaaaggtggatgctgttgtttccccacgaacaataaaaagaaccacccagggcacgaggttcctgccactgcggggtactggggagggtctgggtggaggtggtaaatacatgcacacttgcttaaacaacagaagataccaatattttgaagaggaattaccagttggacataatgatgcggagcgttact

SEQ ID NO: 5980 - DNA, 352 bp, Lilium asiatic
  Clone ID: LIB3230-057-P1-K1-C10
cttcgctggcaagcagcttgaagatggcaggacccttgctgactacaacattcagggggaggccacccttcatcttgtcctcaggctcaggggagggatgcagatttttgtgaagaccctcactggcaagaccatcaccctggagggtgagagctctgacactattgacaatgtgaagggaaagatccaagataaggaaggcattcccccagaccaggagcgactcatctttgctggcaagcagcttgaagatggcaggactcttgctgactacaacattcagaaagaagcgactcttcatctggtccttacgctgaggggtgggatgcaaatctttggcaagaccctgact

SEQ ID NO: 5981 - DNA, 339 bp, Lilium asiatic
  Clone ID: LIB3230-057-P1-K1-C3
gcggtaccttgctgctgaggtgctggagctggctggcaatgctgccaaggacaacaagaagtctcggatcatcccgagacatgtctgccttgctgtcaggaacgaccaggagctgggcaagctgctcgctggagtcaccatctcccatggcggtgtcatccccaacatcaacccggttctcctgcccaagaagactcttgagaagggtgattctgctgcaacaaaatctcccaagaagactcccaagttttcaaagaaagctggcaaaaccccaaagaaagcttaaaagggcatcctggaagctccagtaggaggggaattcgaattagggcttttgga

SEQ ID NO: 5982 - DNA, 262 bp, Lilium asiatic
  Clone ID: LIB3230-057-P1-K1-D12
acgctcggctggtctcacagtgtgaagacagttccaggtcttctgcgactactaagtgtactgataaacatgttgtaactgatctcaatggtatcgactttcaagggcagaaactgtatgatttgagaaataaatcaaagactgatgttgaaaaagagactcatcttaatccactggcggttcaaacactaacggggaatgccttttacgaacagagaacaccccagggattcatgacaatgaatactggcagccttgcagc

SEQ ID NO: 5983 - DNA, 106 bp, Lilium asiatic
  Clone ID: LIB3230-057-P1-K1-D3
cccacgcgtccggcttaatttggctcactctgtgagagcttatgtttctgtgttgggttagtgttgattttggtattttattgctaaaatatgatatggggttctc

SEQ ID NO: 5984 - DNA, 128 bp, Lilium asiatic
  Clone ID: LIB3230-057-P1-K1-D9
aggacgcgtggatgcagacattactgtaacctgtcaacgagcatgcaggggggggtttagggaaaacatggcaaacgccattaaaaaagagaggaggagggatgtgaattcccaaagaatggaagaag

SEQ ID NO: 5985 - DNA, 261 bp, Lilium asiatic
  Clone ID: LIB3230-057-P1-K1-F10
aaaaaaaaaagaggagaaggaaaaaagaaaaaaaaaaaaaaaaaaaagaaaaaaaagaaaagaaaaaaaaaaaaggggagggaaagaaaaaaaaaaaaaaacaaaaaaaaaaaaaaaaaaaaggaaaagaaaaagaaagaaaagagaaaggaaagaaaaaaaggaaaagaaaaagaaaaaaaagagagaaaaaaagaagacagaagaaaaaaaagaaaaaagaaagaaaagaagaagagaacaagaagaaaaagaagagaa

SEQ ID NO: 5986 - DNA, 391 bp, Lilium asiatic
  unsure (1)..(391): unsure at all n locations
  Clone ID: LIB3230-057-P1-K1-F2
nacgattnctntatagaggaggaggagaaagaggataancaacgaagacggccatcccgaancggcggggacgaagcgcgangaancnagccccccagaccaagagaagccacgaccaaaggaagacangaacgactctaataatatggacattttgaagaaggtgggcctccactttatgtggggataggcattgggttaatcataacctgacgatccaaaacataaggagggggaagccacataatagaaaatgatggatgggcatgatgttgaaggggcgatattgtgaaactggaaaggagatgaggcaccggaagctaaagaggggcaatgatagggggctcaaacgaggtgacaacaaaatgatggggaggaacaaaaaataacc

SEQ ID NO: 5987 - DNA, 395 bp, Lilium asiatic
  Clone ID: LIB3230-057-P1-K1-F3
atctaaagcttcaacctctcgtcaatcatgtcaggccgtggcaagggagggaaggggctcggcaagggcggcgccaagcgccatcgcaaggtgctgcgggacaacatccagggaatcaccaagccggccatccgccgcctggctcgccggggcggagtgaagaggatcagcggcctcatctacgaggagacccgaggtgtgctgaagatctttctggagaatgtgatacgcgatgccgttacctacactgagcacgctcgccgcaagactgtgacggctatggatgtggggtatgctctaaagcgttagggccgcaccctctatggctttgggggttgatcttgatctcctggcctgggtctctgtttggttttggttgaatgggaattggggtt

SEQ ID NO: 5988 - DNA, 179 bp, Lilium asiatic
  unsure (1)..(179): unsure at all n locations
  Clone ID: LIB3230-057-P1-K1-F8
gacgggaagcgacgggggggacaggggagggagaccaaagcgagagcaanagggggagggggacaaggcgcgcgcgggcncaggcagaaaaagggcagcgagggcgaaagacacagaggggagggacacgcgggcgggacagggaaccaggccaaaagaggagaaaacgaagggaaaac

SEQ ID NO: 5989 - DNA, 368 bp, Lilium asiatic
  unsure (1)..(368): unsure at all n locations
  Clone ID: LIB3230-057-P1-K1-G12
gattttccgagagaaggcaatggttggagttacgaaaaatgcagacgccaatggaaccttgttgacactgatcacctaaganataagtacttgaatgcatttgatgcagctatgaattcgctggatgatcaattttcgttcctcgcgtcaactaagcagatcgtgagtagcacaaangaacaggagaaggttattgttttcgaacgaggagatttggtttttgtgttcaatttccatccaattaacaactacgaagggtataaagttgggtgtgacttacctgggaagtatcgagnnnncttggacagtgatgcaagggaatttggtggatatggaagagtaaaccacaaggcggaccattttacaac

SEQ ID NO: 5990 - DNA, 409 bp, Lilium asiatic
  Clone ID: LIB3230-057-P1-K1-G4
gtaaactcggaacagtggtcttccttcacggttttcctgagatatggtactcgtggaggcaccagatgatcgctgttgcagaggccggattccgagccctggctccagacttccgcggctacggcctctcggaccagccaatccagcctgagaccgcgtcgtgggacgatgtcatcgccgatctcctggcaattcttgactctctcgctatccccaaggtgttcttggttgctaaggattttggagcgataccagcatatgattttgcaattcggcacccggatcgggttctgcgagtcatcaccatgggtgtgccttaccttcccaagggtttaactttcgagtcgcttccagaaggattttacatatcgaggtggcaggagcctggaagagcggaggcggatttcag

SEQ ID NO: 5991 - DNA, 415 bp, Lilium asiatic
  Clone ID: LIB3230-057-P1-K1-G5
cctcgtgcaaattcttcgtctcccaaaacccctccacaccaatttccctctcaaacgtgacaattttgtttctcctcgagactctatgcctcttcaaaccactcatgctgctccctcatccgaaaatgcaccagtgaactactccataatctcttctgagacagttgtgactagtcctatcaaacaaaactactgttctgttgagcggagctatcatgtaacttcttcaccctataaaccaagcccgaagaagctggccaaacgagagtttgtaaaagggaagctgcattttgatgaaccgggtggtcggaccaacccattgaagcctggtgatattagtgcctctactcctactgctactcctactcccacctcagctgatgatgatgcaccgggaaccttcgattatgagctt

SEQ ID NO: 5992 - DNA, 313 bp, Lilium asiatic
  Clone ID: LIB3230-057-P1-K1-G9
gcagaaggagaaggttaacaacgctgtgctgttcgatcaggcgagctatgataagatgattgccgaggttcccaagttcaagcagatcacaccgtcggtgctgtctgagaggctgaggatcaatggttctcttgcaaggaaggcaatcaaggacttgatggcccgtggtgccatccgtgtggttactgcacactccagtcagcaaatctacacccgggctaccaatacctagaagtcctttgcttgttatgtcatcgtccagtcgtctttaggagcctttttcagttaaccagttttactggtgcttttgtta

SEQ ID NO: 5993 - DNA, 406 bp, Lilium asiatic
  Clone ID: LIB3230-057-P1-K1-H12
gacggatgttcttaccccagaggagttcctcgtggagagggaggatatgctgcaggagctctttcctagctgtgtcataatgcccggtgtcgaacgttttatcagtcatcttcacgcaaatgggatacccatgtgtgtggcaacaggatctcaccagcgacattttgctttgaagactcaaaaacatggtgatattttctctatgatgcatcatgtagtcaagggtgacgatcctgaagtaaagaaaggcaaaccttctcctgatgtatttctggctgccgcaaaaagatttgaggagaaagtggaccccatcaatatattagtgtttgaagatgccccagcaggagttgccgcagcaaacgctgcagggatgtgggcagttatggtccctgatctgaaggtggat

SEQ ID NO: 5994 - DNA, 425 bp, Lilium asiatic
  Clone ID: LIB3230-058-P1-K1-A1
cccagccccgccacttctgcaagacctgtcgccgctactggaccaagggcggtgccctccgcaacgtccctatcggcggcggatgccgccgcggcaagccctcccctcctcttgccgccttcaggtctggcagcaacaaggccaagcctgcagcaccaaatgtgacagctcaggacagggagctcccagcatgcccggtcctatgggcgtcgccctacagctcccagctgctgtctttactgagagccagtcagctccaaaaccctaaccctaatagaattaatgatgacaaaacactgaatgcatatagtcacctcggccagattgcagctgcgccgtaccaatctctctggaggaatgttggcgccgagcacctgaatcaacatcaacaatattatcaacataacatgatgagtggcagctct

SEQ ID NO: 5995 - DNA, 406 bp, Lilium asiatic
  Clone ID: LIB3230-058-P1-K1-A2
cgcttgtctctcgcacccagggtactaagattgcatccgaaggtctcaaacatcgagtttttgaggtttccttggcggacctccaaaatgatgaggatcaggcatacaggaagatccgactgagagctgaggatgtccaggggaagaatgttcttaccaacttttggggtatgaatttcactactgacaaggtgaggtctttggtccgtaagtggcaaactctcattgaggctcatgtggatgtgaagactacagataactacactctccgcatgttctgtattggattcaccaagagacgtcctaatcaagttaagcggacttgctatgcgcagtccagccaaattagacaaattcgccgcaagatgactgagatcatgataaaccaggcgacttcttgtgatct

SEQ ID NO: 5996 - DNA, 414 bp, Lilium asiatic
  Clone ID: LIB3230-058-P1-K1-A4
gccagattgtgcacaagatcatcggtgcccatagggaagaaattgagaagaagattctacagtacgcctaagtgatgatcattctgtgtttatgcatacagaaatttgatcatgaaatctatgtttgtgtgtaataataagtatccccgtgatctgttaggggatttggcactcgtgtatttctttctatattgttgtttattaaatcaatgttagactaatatttgcttgtttgctgaaatctgacttttaagtccgcttgcttcctgaaatctgatttttttttggggttgcctcagagtctgttgtgcggttgtaccattggactagtcagccaaatccgacttttaaagtgcaatggttattgtccgattgctggactgctatatggtttggctcttcaaatttacatgt

SEQ ID NO: 5997 - DNA, 297 bp, Lilium asiatic
  Clone ID: LIB3230-058-P1-K1-A5
agattgtacacaagatcatctctgcccatagggataaaatatagaagatgagggtgcagtccgcctaagtgatgatcattctgtgtctatgcatacagaaattttttcatgaaatctatgtttgtgtgtaataataagtatccccatgatctgttaggggatttggcactcgtgtatttctcgctatatgtgctgttagttaaatcaatggtagactaatataagcgtggttggctgaaagatgacatttatagttcgcttgctgtctaaaatcaggttttttttcgggggtgcctt

SEQ ID NO: 5998 - DNA, 264 bp, Lilium asiatic
  Clone ID: LIB3230-058-P1-K1-A7
cctagccccgccacttcaggtactaagatcgccgttactggaccaagggcggtgccctccgcaacttccctatgggggcctataacatcatgaggatgacttctacacctattgccgccttgaggtttggcagcaacaaggccaagcctgcatcaccaaatgtgacagtttaggacagggagctcccagcatgcccgttcctatgggcgtagccctacagctccaagttgctgtctttactgagagccagtcagttccaaaacc

SEQ ID NO: 5999 - DNA, 226 bp, Lilium asiatic
  Clone ID: LIB3230-058-P1-K1-B1
atgaaaccaagtttggtattatagtatgatgatcaggaagggatattatagcgtgcttggtgtcgatgtaaaactggaaattctcttggaactggtgcatgcagctatttcaacaggcgcagtcagggagcggctggatttttgctttgagcagcaacaggatcttgtggctcgaaaaaggggtgaagtcctagaggaagctaggaaaaggagggaggagaagcgc

SEQ ID NO: 6000 - DNA, 180 bp, Lilium asiatic
  Clone ID: LIB3230-058-P1-K1-B11
ctggagcagatgttatacttggtatattaccatttgcaagagagttgcttggggggggtacacagggggtggtagcaactaatgacctgccttcaatcaacgaagtaacttatgccggataggtggagataatatccgagcttaaggaggaaagggggaagcatgtaggcgtagaaacat

SEQ ID NO: 6001 - DNA, 415 bp, Lilium asiatic
  Clone ID: LIB3230-058-P1-K1-B12
cccacgcgtccgcccacgcgtccgttcctcatcccacctccagctctcttctgtgtgtggttttcagaactatgataaagctttttaaaataaaggaccagaagagggaagatgctggcaatgcttgtggaagagggcctataaagaagcaaaggccaggggaattgcgtgttcaaaaagatattggtgagttggacctacctaaaactactaccataacatttcccaatggcaagggtgatcttatgaactttgaaatcagcattcggcccgatgaaggatattatctagggggcacatttacttttacttttcaagtgtcccctttctatcctcacgagccacctaaggtgaagtgcaagacaaaggtttatcatcctaatattgacttggagggaaatgtctgtctgaacat

SEQ ID NO: 6002 - DNA, 56 bp, Lilium asiatic
  Clone ID: LIB3230-058-P1-K1-B2
gtctcacccatcgcttgaatcatgttctggactgggtaaaggcgtaaagggggtgg

SEQ ID NO: 6003 - DNA, 321 bp, Lilium asiatic
  Clone ID: LIB3230-058-P1-K1-B3
gtccatcaaatggcacctaggctacatcacactaccgataacaataatgggtacgagaccgcacccatttatggggggtctgtgtcttctggatactaacactctgaatacatagatactgacgcctaggcttacagtgtctgagagccgggtgctacacttctaccactgaagcggacagttcgaccaagatacaccttaggacgtcgtaccattagctacaacactggatccagaaggtgtatgtgatgctgccgtatatccagctggtgcgaccgtatcaagtgtatagaccgttgctgcagccgctgctctttcaaa

SEQ ID NO: 6004 - DNA, 399 bp, Lilium asiatic
  Clone ID: LIB3230-058-P1-K1-B4
atccttcaagtcttcaactttgacctcattacttgccttcttgcaatctcgggctgagttgtctccatgcacaaagcaaaaatgcctctcttgttcttcccatttgtagctccttcctcaaacggacccttctccccccctttcttactccatgacagagttgagttgatccttggagcactcccacccaatagcgatctccgactacacgacgctctactaaattttctctgataccacttgttgcggattgactgatttatctactcgcaaagcccgcgtggcactagatgaccttcctcaatgcctagcaaggtaattctcgcacctcactcccagtgtagagaaatagaagagaagagttgagagcacacttgagagaatgttgctcggattctt

SEQ ID NO: 6005 - DNA, 181 bp, Lilium asiatic
  Clone ID: LIB3230-058-P1-K1-B6
ctaccgcccgtaggcgagggacggctctatatcacagaatccggagtaccctcgcgacggtgtaaacctcggtctgcacgagcagccggacaagtgcttcttcgtgctccgcggcagccatcgcatctgttttgaggccgaggcctccttccctggaatcttcaagaagctccaatcctac

SEQ ID NO: 6006 - DNA, 74 bp, Lilium asiatic
  Clone ID: LIB3230-058-P1-K1-B9
ctccttccatctcaactcagcagcatcttcattggcggggcgtggcaaggggggggggggtcttggataggggg

SEQ ID NO: 6007 - DNA, 362 bp, Lilium asiatic
  unsure (1)..(362): unsure at all n locations
  Clone ID: LIB3230-058-P1-K1-C10
aaaaaaaagaacaaacaacaaaggggaggaagacaaaaaaaaaaaaaaaggagaagacaaaaaaaagaaaaaaaaacacaaaaacaaaaaaaaaaaaaaaaaaaaaaaaagaaaaacaaaaaaaacagaaaaaaaaaaaaaaaaaaaaaaacagaagaaaacacaaaaaaaaaaaacaaaaagaaaaacaaaaacaaaaaaaaacaaaacaacaaaaagaaccaaaaaggaaaaacaaacgacagaaacaaaaagaaaaaaaacaaaaaaaaaaaaaaaacaaacagnaaaaaaaaaaaacaaaacaaaaaaagaaaaacccgaaaaaaaaacaaaacaagaaagagaaaacaaaaaaacaa

SEQ ID NO: 6008 - DNA, 370 bp, Lilium asiatic
  Clone ID: LIB3230-058-P1-K1-C12
gccagattgtgcacaagatcatcgttgcccatagggaagaaattgagaagaagattctacagtacgcctaagtgatgatcattctgtgtttatgcatacagaaatttgatcatgaaatctatgtttgtgtgtaataataagtatccccgtgatctgttaggggatttggcactcgtgtatttctttcttatattgttgtttattaaatcaatgttagactaatatttgcttgtttgctgaaatctgacttttaagtcctgttgcttcctgaaatcttgatttttttttggggttgcctcatagtctgttgtgcggtttttaccattggacttagtagccaaattcgactttttaagagcaatggttattg

SEQ ID NO: 6009 - DNA, 423 bp, Lilium asiatic
  Clone ID: LIB3230-058-P1-K1-C3
cggacgcgtggggcccgatcggtttaccccttctctcacagcggcgacggagcgcggcggcggcgggagccatggtgtcgggtaccatctcctacgccaaagaaatggccattcgacggagaatcgccagcatatataataaaagagaagacgatttcgagacattgaaggatttcaatgattatctggaacaagttgaagatatgactgtcaacctaatcgaaggaatagatgtcgccgcaattgaagctgaaattgcggagtaccataaagagaattatgagcagatagtcatttctcgagctcgtaaggctgaagaagaagctgcagcgctaaaggcaagcaaggcacctataaaaaacgatgccagtgacatggctactgaacaaagcttccagactgctggtggtggcataaaaacac

SEQ ID NO: 6010 - DNA, 239 bp, Lilium asiatic
  Clone ID: LIB3230-058-P1-K1-C5
tgcaagttggtcaggatgtttttatttacgaattattcaagctgcccttgctgctgtgggagcccctgaaaatctggttcacataataacaggatatgctgaaacagggcaagctcttgtatcttcagttgacaaaatcatttttgttgggtcacctggtgtgggcaagatgataatgcaaaaggcagcagagacaataataccagtcactttagagcttggcggaaaagaagcattta

SEQ ID NO: 6011 - DNA, 436 bp, Lilium asiatic
  Clone ID: LIB3230-058-P1-K1-C7
taccaaggatctttacttaagatgactagaacatgccaaccagattcaacttcttggacagggggatcataatcaactgaagaaagagcagaacaatcaagggagcccatgttagctccgacgagtaacatgccagagatgactgaacaaagtgcatatgaaaaatttgagcaggaaaggcgagactggactgaaacagagagtaaatggattaggcgttctgatgagctaccagctgaacttgtagatagttgatcactggcagagaaacaaaaaagggaactagattgtgaaaagaaatgcgcagaggaacataaggagggcttgcaaacagatttggaaggccacactcgaaaaacttgaacagtacgcttaatcttgaagaaaaaacatattgctcctgcttgctaaaaattagaagattcaacaaagggga

SEQ ID NO: 6012 - DNA, 120 bp, Lilium asiatic
  Clone ID: LIB3230-058-P1-K1-D1
tatgctgccatttttcaagtctagcacttgatctccttcaatccgttactgtgtgctggttcaataagaacttttttgtactgctgagattaagttttatttataatttggttttatgcg

SEQ ID NO: 6013 - DNA, 196 bp, Lilium asiatic
  Clone ID: LIB3230-058-P1-K1-D11
tccacgcgtccgcctttctccaccacgccgcaggtcgttggagccttcaagagctgaagggtcttcagccacagacctttcacctactaggaaacggttaggggaggcacctattacggtattgttgtcggcaaaggatcttaatgacgagaatgtccggatttaagtaggaagagctatcaagatatgaatctat

SEQ ID NO: 6014 - DNA, 412 bp, Lilium asiatic
  Clone ID: LIB3230-058-P1-K1-D2
ggcctttcgcaacattcccggtgttgatgttgcgaatgttgagcgtctcaacttgctcaaactggccccggggggtcaccttgggcggttcatcgtctggacgaagtcggcatttgagaagctcgactcggtttttgggacttttgagaaggcttctgatcagaagaagggttacgtgctgccgaggtccaagatgtcgaatccagatctatcgaggatcatcaactctgacgaggtgcagtcggttgtcaggccgatcaataaggatgtcaagcgccggacgttgaagaagaacccgcttaagaacctcaacactctgctgaggctgaatccctatgcaaagactgcgaggaggatggcgttgcttgctgaggcgcaacgtgtgaagtccaaaaaagaaaagctggacaag

SEQ ID NO: 6015 - DNA, 156 bp, Lilium asiatic
  Clone ID: LIB3230-058-P1-K1-D4
tttatttattaatgggggggtgtttaatttaatttaatcaaaagccggcattatttctgaaaggatacacggaacccttatatgatcactgctaatgacaaaatgaaaaaatgaggcatttgcttttctaaccactcccatgaaaaagttaaattg

SEQ ID NO: 6016 - DNA, 303 bp, Lilium asiatic
  Clone ID: LIB3230-058-P1-K1-D6
aaaaaaaacaacaaaaaaaaagaaaaaaaaaaaaaaaaaaagacaaaaaaaaaaaaagaaaaaaaaagaaaaaaaaaaaaaaaaaaaaaaaaaaaaaaaaaaaaaaaaaaaaacaaataaaaaaaaaaaaagaaaaaaaacaaaaaaaaaaaagaaaaaaaaaaaataaaaaaaaacaacgaaaaaaaaaaaaaaataaaaaaaaaaaaaaaaaacaaacaaaaaaaaaataaaagaaaaaacaataagaaacaaaaaaaaaaacaaaaaaacaaaaaaaaaaaaagaaaagaaatgaaccac

SEQ ID NO: 6017 - DNA, 301 bp, Lilium asiatic
  Clone ID: LIB3230-058-P1-K1-D8
tgcggagggcgaggctgataaaggtgcgacataaatccgtcgaaaaggtttgggaggggtttgtgatggcgtcgtatcggattctgaaggagttgaaggatctgcagatggatccaccaacatcttgcattgcagggcctgtggtggatgatatatttcactggcaagctattatcatgggatcttgttacatttactctgctggtggagtctttttgttcattattcacttttccgtatttttcttgtttatgctcgtttatggtttctttctgtctattgttttccactcttagtatta

SEQ ID NO: 6018 - DNA, 417 bp, Lilium asiatic
  Clone ID: LIB3230-058-P1-K1-E3
cacgcagtgagcatgaagctagtcggcgcttgaagactgagcttcttatacagagggatggcttggccaagacagatgagcttgtttttgttttagcagcaaccaatctaccttgggagttggatgcagctatgctccgtcgtcttgaaaagaggatacttgtgcctctgccagaaccagaagcaagacttgcaatgttcgaggcacttctgccttcagttcccgagactgcagagattccatatgagttccttgtggaggggactgaaggctattcaggttcagatatccgtctagtgtgtaaagaggcagccatgcagccagggagacggttaatgacaattttggaaggcaatcaggagcgagtgcccgatgatgagttgccagcttgtcggccagtgacacctgcatgatatc

SEQ ID NO: 6019 - DNA, 342 bp, Lilium asiatic
  Clone ID: LIB3230-058-P1-K1-E4
gcttatttgaagtcgattcagattgcacgggaaataaatcaaaagggtccgcttgcaattaggatggccaagcaggctatcgaccgagggatggaggtggacataaccgcggccctggctgtggagggagaatgctatgaccagctcctggacacggatgaccgtcttgaagggttggctgcagttgcagagaagcgaaagccaagattcactgggaagtagtgtcttggcggtcatcttgttgcttcaaatttatttgtggcactatatttcgccaaattagaaaaatgctaaataaatggaaacatattctttcagattattgattttcgctactgctaa

SEQ ID NO: 6020 - DNA, 393 bp, Lilium asiatic
  Clone ID: LIB3230-058-P1-K1-E6
gctccccgctccccggccagtcgaaggccaatcggtcttgaagaggctgcagtgggaacttatggctctaatgatgtgtggggatccggggatatcagcgtttccggaggccgacaacatgatggcatggaaggggacgattgaagggagcaaggagactgcttacgagggaatggtgtacaggctctccttcaacttcacatcagactaccccttcaagcctcccaaggtgaagttcgacaccccgggcttacacccgaatgtcgatctctttgggaatatctgcttggacattctccaggataagtggtcatctgctttatgatgttcggactgtgcttctttccattcagagccttctcggagagcccaacaatgactcttcgtgaactc

SEQ ID NO: 6021 - DNA, 302 bp, Lilium asiatic
  Clone ID: LIB3230-058-P1-K1-E7
gtagacccttttgggcacgaacggaatcaggaatttttcgtactgtattgagaggggatcctaactttgctgattctccttggccaacagtatctttagaagctaaagattttgtgagaaggcttttgaataaggactacatgaaaagaatgactgctgcacaggctctaactaacccatggatgctaaatgagcagcattaggtccttttaatatattatgtgattagttagtgaaaacatacgtttatgccactcccttaatacgagcaatattgaaggttctgttctaatagcttttac

SEQ ID NO: 6022 - DNA, 285 bp, Lilium asiatic
  Clone ID: LIB3230-058-P1-K1-E9
cttccgtatgctcgactataagcttgcaatgagcattttggcgccaaagggggggttcaaggaacatgatccctcatttgttgctaagaatgagaaattgatgtcatcaagggacttgttatcgccacatgatatgaaacgacttgaggcttacacaaacaattgtgttgattatcatatgagtctggatcttttaccgattcctgtacatctgtatatttaagagaagattccgtggacattaattttctgtcaagcatatatcttattctgctatggtgcatg

SEQ ID NO: 6023 - DNA, 423 bp, Lilium asiatic
  unsure (1)..(423): unsure at all n locations
  Clone ID: LIB3230-058-P1-K1-F1
caagagtgttagattagcacgagctaaattgatcacaagccatcctaagtgccagaaggaaaaccaaattgataaaagggtgccaaagcctcaagcaagtgaagcaagactagctcatggcaagagtgttagattagcacgggctaaattgatcacaagcaatcctcagtgccacaagacattgcagtcggaaagcagcaaggataaattgcgcgagacatcacataaagaggtcgtagtgaaggtggcctcatcgaagcaacctctcaaggctcaaagtctgatggcaccaaggaatgcacatagctcctcaacacatggaaataaagtcatcacagcaaatgctcattcccaagtgaaaaagtcagcaacagctcanggagcgaccggatcagctattgtgtctagagatgggcacaacca

SEQ ID NO: 6024 - DNA, 382 bp, Lilium asiatic
  Clone ID: LIB3230-058-P1-K1-F12
cggacgcgtgggcgcggatcgcggctaacggccgcgtaggtgcgacggcggcggtgtactcggcggcgattctggagtatctgacggctgaggtgctggagctggcggggaacgcgagcaaggatctaaaggtgaagcgcataacgccaaggcatctgcagctggcgatccgtggggatgaggagctggatacgctgatcaaggggactattgctgggggtggtgtgattccgcacatccataagtctctgatcaacaaatctgcgaaggagtgaactttggtgggtggatctagttgggtgtcttagttatgtgtaggtgtatctgtggttgtgtcctgtttctgttatgggttgttggttgttggttgtgttggatctga

SEQ ID NO: 6025 - DNA, 426 bp, Lilium asiatic
  Clone ID: LIB3230-058-P1-K1-F2
cgtccgcggacgcgtgggcggacgcgtgggcagcatcaaaatctgcaaatgcacggccaaagcataccattccccaaccatttgctcttgcaacagaaaaacgtgcttctggtggacctcgtctatttgttgctaataatgctggaaatggagacagaactgctcaaccacagaacacttataagaaggcacataataacttacctccgacatcattgaagcctctggaaccacatgacgggaaacatatcgatgatgaggatgtttgctccattgcttcatcaactgcaacatccatgagagctttcaaaagcaagtttactacgggctcagccacaacttttagaagcagtgagcgtgcagagaagcgaagggagttttactcaaagttagaagataaacaacaagctctggaagcagagaaaa

SEQ ID NO: 6026 - DNA, 419 bp, Lilium asiatic
  Clone ID: LIB3230-058-P1-K1-F4
ccgcaatctaggtttggggcaatcgctctggccagactggatcggagtgcaagtgggagagggaggcacttggggctcgtggggcaagatgagcaccgttgacaagatgctgatcaaggggattcggagcttcgatccggacaataagaacgtcatcaccttcttcaagccgctcaccctcatcgttggccccaacggtgctggcaagaccacgatcatcgagtgcctgaagctttcttgcaccggcgagctgccccccaactcccgctctggccacaccttcgttcacgaccccaaggtagctggcgagacggaaacaaaaggacaaattaagttgcggtttaagactgcagcaggaaaggatgtggtgtgcatccggtccttccagcttacccaaaaggcatcaaagatggagttta

SEQ ID NO: 6027 - DNA, 366 bp, Lilium asiatic
  Clone ID: LIB3230-058-P1-K1-F6
tcggtttggccatggtcgtgtcgcactaatatgatttccaagtgtggggaagtcgacgctgggaactttattaacaggggcacattcagaagctgcatcatatgagtacacaactcttacatgcatctcatggtttatttactacaatggttctaaaatccatcttcttgacctttctggaattattgtagggtcttcataaggaaaatgttcgtggtatgggatgttttggtgtttcaaagtctttagacatttggcttgagggttttcgatgcctcataaagtgagggatcattgccaaatattgacataagaactctaatcttgtggattgggtttggtctagaagccacttaaaattatttt

SEQ ID NO: 6028 - DNA, 271 bp, Lilium asiatic
  Clone ID: LIB3230-058-P1-K1-F7
cggacgcgtgggtgagactgaagacaacgaggatgacgaatccgaggcctggggttcaaagtgtcctggcccctctaaacctatcaaggataccagaatgggggttggggcctctgattcctggcatttgggacaccatctttgccatttttggtcattggcctgacctaacccctgaccctattgaagataaaaaggaagcgattggttggatttcaaggggtaaccagtggcctaaaggccggaaatgattttgattggccgttttttg

SEQ ID NO: 6029 - DNA, 229 bp, Lilium asiatic
  Clone ID: LIB3230-058-P1-K1-F8
tatcggaaactaaagcccttacccggtcttaagggtatcaatggggagaacctgggggggtcattatttgcgaagaccacatatggtgtcaagatggccaatgcctttatttacctttgaaattaagatgactagggcttagatttgtatgcgtatgtctcgcttcctgatggggttcgtccttgcatatccaggacctccaccggaccccgtgaggtgtttgccaaag

SEQ ID NO: 6030 - DNA, 328 bp, Lilium asiatic
  Clone ID: LIB3230-058-P1-K1-F9
ctcctgttgataaccagccaagctttcctccccgcctaaactgcaatgaagtacaggaggtttcacatcaaggaagtcctcagaaatttgtcgataatggacaatgtgctaatttcaccaatggaatcaaagatattgcaacactcaactcagatgcaagtttggtacctcaagataaccgatatcaggggctcattccaccatcatctcatccgttgacctcacgaccaagatctttcttggcttctcgcaagtcttgtaattggatttggggtccttccttattacccggagaaccccccaccccagttaaaacttaaattgcccc

SEQ ID NO: 6031 - DNA, 417 bp, Lilium asiatic
  Clone ID: LIB3230-058-P1-K1-G2
gcagaaagcaagcagaacaatattatcgcctttataaagagccaattccagttactcaacttgtgagggaaactgctgctgttatgcaggaattcacccaatccggtggtgtaaggccatttggggtttctctgctggttgctggttatgatgacaatggtcctcagttgtttcaggttgatccttcagggtcatacttttcatggaaagcttccgcaatgggaaagaatgtttctaatgccaaaacattccttgagaagaggtacactgatgatatggagcttgacgatgctgtgcacactgccattttaactctaaaagaagggtttgaaggtcagatttcagggaaaaacattgaaatcgggataattggtgcagaccgcaagttcagagtgctgactgctgctgagattgaag

SEQ ID NO: 6032 - DNA, 341 bp, Lilium asiatic
  Clone ID: LIB3230-058-P1-K1-G3
aaaaagagaaaaaaaaagaaaaaaaaggaaaagaaacaaaagaaaaacagcaaaaacaaaaaaaaaaaaacaaaaaaaaaaaaaaagaaaaaaaaaaaaaaaaaaaaaaaaaaaaaaaaaaaaaaaaaaaaaaaagaaaaaaaacaaaacaaaacaaaagaaaaaagaaagaaacaaaaaaaaaaaaaaaaaaacaaaaaaaaaaaaaagaaacaaaaacaaaaaaaaaaacaacaaatcaaaaaaaaaaaaaaaaaaagaaaaaaagaaaacaaagaacaaaaaaaataaaataaaaaaacaaaaaaaaaaaacaaaaaaaaaaacaccaaaaagaaaaa

SEQ ID NO: 6033 - DNA, 367 bp, Lilium asiatic
  Clone ID: LIB3230-058-P1-K1-G4
tcgcggtttttatcagatgtggacatgagggacaggtggacgacttttatccttaagaacccgccggagcaaaagaagggatccaaggataagaaggcaatgaggcgtgctgagaaagagaggctcaaggaaggtgaagctgctgatgaagaactgaagaagctaaagaaagtgaccaagaaaagtgctgctgtatcatcaaaaccaatcacatctaagaagaagtctgctggctctgatgaagaacattcatcaccatctggtagtcaggctgatgacaatggagatgcagaggatgatgttgatgatgatgatggtgttaaatggcagacttgacacctttgcttgaagcagccgcatacgtatt

SEQ ID NO: 6034 - DNA, 422 bp, Lilium asiatic
  Clone ID: LIB3230-058-P1-K1-G5
tgaatcttatgtatcttgcagcaattgcggataatcaaccccaagttcccaccattgggcagtaccctcctgctgccgccatgcaatcaggccctcgctacatgccgcaccagcaaacacaacaaatgaccccccaaagcctcatggccgctagatctgcgatgatgtacgctcagtcaccaatgtcagccctgcagcaacagcagcagcaagctatgttccacagccagctggggatggggactgggggcaacaccggctacaacatgatgtacggtgacaacagtgtgggtggcaccagcagcagcacactgactggcagcgcattttcagattttgggcgcaacagtggaggcagtaagctggaaatgcactttgaagggcgtggtggcagctttggagggcaaatcgggatgggacaa

SEQ ID NO: 6035 - DNA, 415 bp, Lilium asiatic
  Clone ID: LIB3230-058-P1-K1-G6
ctcacctcaggtctccacatctgttgtggagccttacaacagtgtgctctccacccagtctcttctggagcacactgatgttgctgttctccttgacaatgaagctatttatgacatttgcaggcgctcccttgatattgagcgccccacgtacaccaacctaaaccgtctggtttcacaggtgatttcgtctctgacggcatccctgaggtttgatggtgccctgaatgttgatgtcacagagttccagaccaatctttgtcccctacccaaggattcacttcatgctttttttctatgcaccagttatctttgctgaaaaggcataccatgagcaactttctgttgctggaatcacaaacactgcttttgtgccttcttcaatgatgggggagtgggaccctcgccatggcaa

SEQ ID NO: 6036 - DNA, 310 bp, Lilium asiatic
  Clone ID: LIB3230-058-P1-K1-G8
aactacggtacgatccatgccggtaactgcaccagtagcaacgtgatcggcaacagcggcagtggcgacgtcaatttcatcaaccgcagcgtcgcggtggtcaacggcagcctgacctttgccagcggtgatgactcgctcacgctgtatccggggtcgatcatcaccggcggcttcaatggcggcggcggcaccaacagcctgacgctgaccggcgaggccggcttcagcgacaccttggccggcaccatcctcaactttcagtcgctgatcaagaccggcgatggcaaatggacgttgttcggttcgg

SEQ ID NO: 6037 - DNA, 245 bp, Lilium asiatic
  Clone ID: LIB3230-058-P1-K1-H1
acactttcggctgaatctcatccgatgcaagcacattcctaagcgcccaggtgctgactggcatgatcttcctgaagagaaggtgaaattgtccaatggacaaatggtggatttgattccatggtgcttgccgaacacagcgcagaggcacaaccagtggaaggggctgtttgggaggctggactgggatggttactttacgacatcgatctctgattccacatcctatgtttaaggtggggatg

SEQ ID NO: 6038 - DNA, 314 bp, Lilium asiatic
  Clone ID: LIB3230-058-P1-K1-H11
ggagaacctcatcaattaggcgtcagcatgaactacctaaataatgaggtcttccagagcgcgtgaagcgtccagatattgtctggtctcggatcagtgaaaggccacatgatattcttaaagaaggacctgcaaatgtggaggctaaaatatatgacttggaagaggaaatgattagcgctttaacacaagtaccgtgggaacgttttgatttgaacttccaaaaaagcaggcaaagattgattgcacatactacaatttaagtgaaaaattattggttgaacatcgaccgttaaaatttggttttttaatat

SEQ ID NO: 6039 - DNA, 417 bp, Lilium asiatic
  Clone ID: LIB3230-058-P1-K1-H12
ggagaacctcatcaattaggcgtcagcatgaactacctaaataatgaggttttgcagagcgcgtgaatcgtccagatattgttggtccggatcatgaaggcgcacaggctattcttaaagaaggacgtgtaaatgtggaggctaaaatatatgacttggaagaggaaatgattagggcgtttaacacaagtaccgtgtgagcgtgttgatgtgagctttcagaaaagcaggcaaagattgattgcacatactacaattcaggtgaagagttattggttgaactcgtacggtgaagatgtggtttttcatatgattgataactttctcgtttagttatccaaattgtgaaggataattattagtctgttgtttgagattgatattgttagaggaaaaagatagagaccatttaataat

SEQ ID NO: 6040 - DNA, 414 bp, Lilium asiatic
  Clone ID: LIB3230-058-P1-K1-H6
gggaaaccgtatgacaagcccaatatcgttactggttccaatgtccaggtttggtgggagaaatttgcaaggtactttgaagttgaattgaaggaagtgaacctgactgagggttactatattatggaccctagaaaggctgcggaattggtggatgagaataccatatgtgttgctgccatcttaggttcaaccctcactggtgaatttgaagacgttaaactactgaatgatcttcttactgagaagaacaaagaaacaggatgggatacaccaattcacgttgatgctgcgagtggtggatttatcgcgccttttttatatccagagttggaatgggattttcgtctaccactagtaaagagcatcaatgtcagtgggcacaagtttggtcttgtttatgcaagtgttggt

SEQ ID NO: 6041 - DNA, 381 bp, Lilium asiatic
  Clone ID: LIB3230-058-P1-K1-H8
cggacgcgtgggcggacgcgtgggcggacgcgtgggcggacgcgtgggcggacgcgtgggctcgtctgcgtctcctttcttcatctgctcgtactcgtctgtgctatggttcaacctgaaatctgaagcttatgcgtagtatataaaaatattggttacaaatatttctttgacaagttcaacccctcaagaaagtttaagtttccatatacatatatttagttatcagctatgcaactagtggctctgatggctagcaagatttcagatggtgtcgtggctattgatagatccagtttcatagaacaatgtggacttttatgtcgatacccaaaatcataacactgtatcggatcaagttctacatgccaagagttgagc
